United States Patent Application Publication US 2013/0096032 A1 - sequence listing, part 15

SEQ ID NO: 483 - DNA, 77401 bp, Arabidopsis thaliana
gatctcaatctttggttttgaattcttcagattatttttggttcttttacgagtcttttgatgttgatgattagtcttttattgagacactaattcgcaatatgttatattgatcttcgataacctttctttggttcaaaatattcttagatttttaaaatggtgattaggttttggttaattttgtttttggtaatcgtcgttgttcgtatcgttgtgccaagatttggttatttccggttatctgtggttaaatatcggttatttattgttctggtatcaatcattcaatacattgcaaagagttcatcaatctgaaaatggtaattagtttttggttaattttgttttaccggttcgcgggtgttcgtattgttgtgccaagatttggttatttccggttatatgtggttaaatctcggttatttattgttctggtatcaatcattcaatacattgcaaaaagttcatcaatctgaaaacgattgatatgcagtgaagatatatttatttagaacaagatcacaaacagtttaaactcgaaagaatcatataattggtgatctgtgttcattagttaactttagtgaaatgtaattaatcagcaaaacattacatagtcgatgattcatgaattgtatcttaactaaatttcaagtcaaataatgtgagagcaaaagtagatttgcaacattacaaaggtatgaacattttacaagaacataaatgagaagaagctcacatttttgtctcagtaaaataagttgatgagacagctaaaccttcatggtcatatgtgcggatgagtctttgtcttgagctcggcgattcaagccagcagaattctaagtggaaagactttaaatcagcaacacactttgatacgtcgcaaggacatcccatgtacatacctccgggtaacagagtcatttggtatccttccgcgaatgtaaccaagtctttcgacattttcccttcccagtgcacatttgttgttacttttttctcatccgatgtcgacgaaatatcctgattcacatcgagttcagaggcattctcatataaacagaagttaataaaaggctatgtgggattgttgaacagtattatatacctggactacttgacctttgtcattcatttcaagaacagcaacagtatcggcttctgatagtgttgctccatagacaccgcttcgttttgttaccgaacgacctttccaagtaccgagaaatgggtttatcctttctgcatcgttctgtaacaaaggggaacatatattggtatggcagtaaaatgctttatgagcatgaatcaataacaacaaactacctgagcgttatcgaggactggatgagcgagattctctaaccctctttcctcgaggaaaacaataagcatttcaagaacacctttaggatccatgatgtgaaaggctctagcccttctatctatctccttagaatacaaacagttctcacatactaaagacggacgccgagatggaagtttaagatttctgaaaacaaattgttataagcttcatggagcattaaaatgtttatacataagaaggagccaatagacatgagaaaccaaccttggtgattcttctcccgtgtcatcctccccgagcacgccctgccttaacgtcgtatccaacattccagcggtttggtacctcagcgaaaacgctctctcctttgggaaaaatccaatctgcagactactgatgatggatatcaagatagtcatcaaatacttaagagacaaatcacaaaactcaaacttagtatcttgactaatagagataaacagagctactctcacctgctgatacttgtccacagtgaacatattggtttctttaattttgtactctacccattccggttcctcttcctcctcttcggaaactgaagtagctgatgtaggctgctttatatataacctaaacaatacaaacacaaagactggtaatgcagagcaaaaaccattgcttctggatacattatataggaaacaacaataccaatgagcatcaataaatatatgaataaacttcgtgaggacacacaatttcttacacatcattgaaaattcacaaacttttctatagtacaaacacaatacagattagtaaactagttgtacagagcaaaaaccattgcttcacacaaaatcaacatatagtgtacaagaaaaatcttcaggtatgctaaatgatatccatttgttccaaatagtaaacaagataaacttcaaatttgctccaaattcatagaataatcatataaagttcaagactttatatacttcctattgccaaattctccatcaactgattcctaaagataattgaatcctaaattacacacaatccatgttccaaaaacagttattcccattgaagcagaaacacagattctcagaaacatacgattgattaagactaaggagctcatcttctccataagaactagctgaaagacgtgtatcaatcttatgtaacaaattcccattaccatcaaattgctgcaaaaacaaaaacaaaaagagagagtctttagcataaatctaacaaaaaggagcaaactttagggtttatgggtgactatacatgaaaggagccagtccattttccgacattaagatcgacgaatcctcgtaaattgtcaatactcattgattcatcgcttgttctcttgtcatcttcttgaaccgtcatggatcttataacaaagcttctgctggttccatagtctgagcgtagaattggggaacgaatgggtttaagggatttggatagtggagtaaaaggaagtgagcaagtgaaggaagtagcagcagccatggaggagctcttgagcgagtgagtgattttgtctttgtgaatgtatcttatctacaaacgacactggcaataaaaccggaccggatttgaagttatatcgaaatgtcggaaatcggaaccaaatctgaattaaaccgaaccggatttaaactgaacccgaattttgtagagcttatttgaaatatttaatagaatttatagacaattaattagccagaaaatagaattgttaggaaaaaattattgaacgagggagcgaagcagcagaaataagctttggtaattttgatatcaaatttcaacaaaaagtttttttttcttttgctggaagaattgggtgaagacgaagattaatatatcaaggaagatcatctatgggtcgtattattacgagtgggtcaagtcgggttttaatttggtttcatatagaacttatgtggtttgttgttcggtttagattgtaaatcgagtaaaaccaatgtctgtttagattttgacaataactagccttgaaaattcaagtatccgttataggcaagtcgaataacaagtcggttaattttattacttgcaagtccaagtcaagtatcataatatttttgatagttgcttcgttatttgcctcattttgatatttgtcatattactcgttacttgtatatgtgacttgtgggatcgttaacaactagatctagacataactttctccagaacctactcttttaataagtcctttattaactagagatctacctgaacaaatatttctccatctataggatggagagtatgaattatattattcaaagggttggatttccgaaaataacgtcctttaaaaacccgcgcaaagagtgaatttggaaccgtgattaaacgccataattgtttagctagaagagccgaattaaaattgtctacactacgaaaacccaaacccccttccgatttactataacacaccttatcccatgccatccaatgcatacctctagattcaccatttgaactccaccagaattttgggattgcactcgtgagcttcgatgtgattgttttcggtagtgtaaagcaagacataacataagttggtaatgccgtagctaccaatttaatcatcacctcttttcctcctttcgataaaaacttagctgaccatccatttatcctattttgtaatctatctctaacaaaagagaacatttttgttttagatccacctagactttctggtaaaccaagacaggagcccataccaccaagattagtgattccctgttgattttatttctgccttaagtgaatcatctaccttatgaccaaactgtatcgaggactttgaaaaatttatttgttgtcctgaaaccgcttcgtattgctttaaaatttccaagattactccacactgctctttgctagctttgcaaaagaataaactatcatctgcaaataacaaatgagttacagaggagcttgccgtatctactttcataccagtaatcaattttcgttgttcagcttttcgaatattcgcaataagcacctccgtacatagaataaatatgtaagaagatagcggatttccttgtctttaatctctccccggtactatcaagcctctaggttatctattaataaaaacctgatattggactgttgttgtagaccacattatccatgaaatccacttttcgcagaaacccatttttctatattatccatgaaatcatgtacacttttttattatgaaataacgaatattgtaataaaaataaagttattaattttctaaagaatcttacctaaactactttttatttttgaaaactttataaatcaccaaggttatgccggtagttaaaccaaaataaagggaaaacgtagaaatatagggagaaacaagaccatttaaattgcaaggatttgaaccgatttcatgtgtatagctttttaacttcttgtttttgaccaaatattataggatcttaatttaaggtggtctgatctaacccacattaattagaaaacatacacagcttcttgtgaatttaaggtggtctgatctaattaattagaccgtagaaagcaaaaacatggtgttgtaaaagaaaccaagaacaaaggcttgaacatatatggggttgccaaaacattttttcaagacttcaaagagggatctgatcaacgaacagtgtagtcatcttctccttgatttttccttcgggatgggtgtatccttcgtcttcactgtacgtgatagagatcatgagtccaacgcccattgctagcttaagaaccaagcgtgacactcccattgtcgtcaaaaactcttcatttactgtcttatttgcaaccgcaaccattttttcaaactcctttaaagcttcttgttccgtaactctatattgtttcatataacaggtgaccgcattcgccgcatatcctctactcatatcttcctgataaatgtatgtgtaagtaacagtgtaagtttgtaaggtatagggacaaaaatatagtagacaaaaaccggatgtgaagaaatgatttaagcgaattcgtaccttgtaacctttcatatcattcattagacgacctttgatagctaaagcttggataatttttggtctggatttgagccacttataatcttccttcggaactatctttcccatacacatcatagcacccattaaagtcgtcattgctgtgatccccaccccagtaacctctatatactcctcaaagctaggcatgttatccgctagtgcccatttttcagcctctaagttggctttcacaagtgacttgaactacaagctcaaatttataaaatcgttaggactattcaaaatgttgttttttcaaaagtcatgggaaaaaatacctattagatgtccaattttcaaagttggttgatttaaatccccaatttattctgcaatgagatatatagtgtattttgtttactatccgatttcatatctaattattgttggttttccgaaaacaatcatatcgttaaatcgactaacagaacaaatttatgggagtttaatttctattaaggatctctgttacaaattatcataagaaactcggttaattttttcaacattcattttccctctctgttaaattgacagaataaactcggttcacttgtgtaatatacattatccctcctctttttcttttatctttttttttgggttgtcaagccatttcatatatatatatatatatatatacatatatatatatatatatatatatattctctctcttttattggtttgatgattgatcatacaattaaacctctacatatgttcggatgtagtttcacttttctttattttttaatttctgttagatttatctcccgttactctaccaaaaaagcgctaggcgctaattaggcgatgaccgaatgccaaagacctaaattgccgagctggggcttaagcgattttatacggttaaaatgtttacaacataaaatattatacaaaacacataaataagaaatatataactattaaatcatgagcaaaaattagaaaaaatgttcatttaattcatatcaaacaacatatgaatataaagacgaaacttagaaatttaaatttatgtttttagaaattagaaaaatatactaaaattaaacaaatataatattaagcggtcgaaacggttgtgtaggcatcgtgtgagcgcttagcgcttagtcggagtctagacgaccgtccaaactactttttagaacactaatcccggcagaaaattatttttcataaaacattcaaaagccacgggaaaatatacaaccttgagttatatatacatatactatgtgtatatacatacacgtagtatatatatgtcaacgacttaaccatatagacatatacaagttactaaaaagagtttgattgattacctcttctattgtggcacacacaccgaaagatcctccttctggcctaagttctttttcgaactcttcaaatgtatccaatataaatttaaacacgaatttcaaataatcaggttgtttatccatggcatgatcaggagcccacctgtacatcatcatcgactaaatcatccattatcatcaccatcaccaccaccaccatcatgatcattctttatctggaatgttaatatataaagtgtacctattcaagctgtttacgaggctttcagcctcaggaagggacgcatatctgtccaaggtgtcatcttgaattactaaaagaatgaagtacttagccatcataatccttgcacgtgagtgttgtgactccacaaacaacgtttgtataaagaaatggttttcgacgattctgtctctgaagtaaggtggcaacttagatacaaaatctacctccttgtaccaccttccatccaaacatagatggttagaataactcttaacaaagaatcgtagctaagtaattgagaagatgttacatactttgtaagaactttgagttcttgaaggtattggagttgtagaaacttgaaattgagcttagaaaacttgagtagcatctcgttgtggtctttttctttttcgtagaatgatatatattccacagcgactagcatctccatgttccaatgctgagatgcattgagagcatttcgtatacgccttgacatatgaggcgggcacgccccatttgcagctagtgactccaagtggctcgatgtgaagctcaatgcttcgtccagtatataatctttcgtcgtcgccatattggcagcttcataaaagctcaacatacccttggcatctccaataagagattttttgaagtttccgtcgttccctttgaatctcctaaagaaatctattgaccaaaacgcaacatgttatacaacatattagagttaaacatcaatgatgataaaaagtgtaacgacccgcgttttgaattaaaccgcgaggcctgaacggagttctttaacgagttaaacccgagagaaaccctaactgtcccacgtgtatataaaagaaaaacacaagtgccaagacaagtcacaaaaagcctaagtagaggactcatttacctgaagatatgtagtgaccatatctcctgaaaacccaaaagatgatagaaactgtgtacaaatcttcttcattggccatcatctcctctatttttccgaaaccctcttttaaagtctcatagatctcttcctcaaattgacatgcaaggccaaggcttatcagcatatatatcataaggattctcttctttgtcgagtcaatgccttggaaagacataagtatgttcttcactttcggctttagtgcatcaatctctatcctgatggcatccatttcctgaaagtaagatatatatcaatatatgaacacatgctttaactttctctacatctatatgactatatcacaaacgttatatgtagggcggctcaaaaaaattaaggaccacgagcttgaaaaaaataattggcccttatttttttttatttttttaaattttttttgataaaccctatccgctgatccagtcaatttcggtagaaacgcaccaaaatactttaaagtggacttctccccgaaagaccaccacactgtctgtcccgagtttggaatgctttcaaatgtgattttttttttttgttttcagggaggatcgaactatgaaagtttcacccttccccaaatcttctcctaccactggaccacaaatgcttgggcttattttctatgttatgttttatttgtaaaataaaatttggaccctacttttaataaatttagttaccaaaaaaagatggaccatgtgcatgagcaccttccgcacatgcatagagtcgggccgggttatatttatatgaacttaccgagacatcgacttgaatagagtggaagtgatgagtccattcagaagttggcagttccttgaacatattattgctttcttgattatcacaagtcagagccttgaaacgaaaaacctttgcatggttactgggaaataatgtccggcgaaagcgagtgactttacttactttaaataggttgtaagaagaatgaagagagattagagatccatgttttggcccgaaaattgatatgacttccatgttcactacaaatgatatagaatgcatattaattatcaaatttataggccacaatatcggtccttgttatattttatataatatgttcactacaaactgatatgatttttttaatttttttttgtagtagagtgtaactgatgcactcaattgattatagtatacaaacgttgtccgttacatcgatcagtgtcccgctaatagcgcaaataaaaattaattacgaatgaagatacaaaatctcttcgccacggagttcgtttctacacgaatggagaacacgtaggtccgccactggaacaacacattgagctcgtgatgctttaaaggctaagctttttaaaacacttctcattaaggagaagattggtggaatagttctctccataatggaagaagatgatgaaaacgatgagcactaattgctggacttttgtaaagttactaagtgtgtgttagatatatgtgtttgaacgatatgagagtgtaatgagtataagagcataaaagcagagatttgttaacggggtttggtaacaacctacatcctcaggacctagactagaaacaattccactaaaacaagattgctaatacaattgcgtatgatattacaactcagcaacatcacaatatagagacctaaaataatggtgggcaaattctccccatcgaaaaggaggatggaaaaatagatctcttctggccctcacataaggaattttggtaatgaggcagaggaagaaggttaacatacccgaacaaaatacgtaaaggttctctcctttacacaggaggatgactagaaggctctttccttgtaagttaacacaggaggatgacgagaaggctctctcctagtgacccatttccacttttacaatggatggagtcggactccatgtgagacgagtcaaactccatataaccagtggtgaccactacactaagcagccaattatcattctacaggcactaacacacaaaaaaatacatctccaaaacaaataagagcgactaaaactcatatacaggtttccacaattgagagtatgtacataaacgacaccgtttgagtaacggctaattacccttcttcaataccactgaccatgcacgctttgtacagtggaataatagtgtaacaacgtttagaaatattgtaaagtaaaaaaaaaaaccaaagaacattcaaaaacctttctactctactaccaaagccatattgtttattttgttgttgcctcagtccagtcttctgagcaagtactccacttgaacctcttttgttaaaggcatgatccaatctccatataagtcaccaactaagatcggactgattttgtaaacatgagattcattcccttcttcttcttcttcttctttctcctccatcccaactttcacttcttgcccgtatgttcgggttttcatctcaactctcttctttatcgcatcttccacagtcgggaatgtcagcatatccatcagtgcatccttatcctgcaatgcgtatgttgccatgtcaaaaggtaagtaatgcataaacttcgagtttttgtgtgtatgtgagagctttagagaagtagataaatacttgtgctttgatggcggactcgtatgcttcgggtgaggcttgaaatttagcttctgcaacaaatttaccgtaatggattctctttgagagacactgcaatggacatcaaaaactacatgagacgttaatcgacttagaaaagaggtgacaagtttttaaacaaatatccaagcttgtttctgatacctaacaaaaggaaaaaaaggaacaaacctgaaggcagatagcgtcacagacagctgttgagccgtagttaccatcatcgcctttcttcacaagtcttggaacaaggtctctgaagtacatgttccatatcttcttgtttatgtttatcgaatcagcagcaaaatgcaacacctatacaataagaaagaaacttgaatcctcagcaccaaagtacagaagttgaaaacacatctcaaacaagattacacattgcttcaccgaacatcaagaaaccatatcggtaagatgcaagaaaacataaaagagacgatcttttttcatgtgaaacatgtatattgagtacctttgggtactgaagaggaggcaacataggctctggtagatcatcagggaagaaaggatgttcatcaggactcttaaacctaccaacctaatcaagttccataacaaagtcaagtttcaatcttgagggtatgttaataaagagcatgtgtttgttaccttagcgtgaagcttctcagtgcctttaaccatgtactcaaccaaagaaccattgaaaccatccatgtcaaaagcagtaggatcataagtatcagcattgtaacagtacttggctctctccaatagcccaaatataatgctgtcctcttgacggatcaaagagtttctaataccttcaagagtcaaactctcactctcatccactcgtttcttccctgtcaacgatctatatcaacaacaacaacaaacaaaaacaaaactttgcttcaaattcatctaagaagaacataaaggtttctaatttaagctacaaaatcacaaagggttatgttaatttcacaatgggaatctacaaatcatgaaaggtaacaaaaagggtaatctcaatttctcaatagaatctaaagattgagactttcgtacccagcgagtgtcataacggcgtgaacagagctggttccagagcgtggctttgatggctgaggaagagaacaacgaacagagaaagaagatttggttgatggaagaggaagaagagtggaaatgggtgttgaggttgataattcacgtcgatggtcgaagaacccaccaatcgcagaggagcaacaagacgatctcatcaacaatgacgcttccattgatgtgaaaaaaacagaggagacggagaaaacagaggattgagaaatcagaggaagagacaaagaatcatgagcagaggaatgagagatgttaaaagggattgtttgggggtaggtgcagtgggtaaagagaaagagttggtgagagagggagagatgtgtagggttgtgtctgcgtgcacgtctttagcccacgaaagccacaaaagtgtttctgttctgttctcatgacctttttttttctattttgtgttctctcattaatttcaatcattatttttatgttcaagttgttttataacttacaactttaccaaagtttagaatattaatatgaaaacaatattttaagattcaactttgtatatttttttggtcgatacatagaaacaatcaaacaaggattaaataactacataatatatatataaactaccaatgatatgaaaagaataaagaatttaaatatgaacaaatagtgtatagaagagcagtgaattatcctctctttttctaacgtcttgaattattatttattacaaactaggtaatcacccgcgctacgctgggatattttcaaattttttgtatcgtttaatttaaatataatttttaattatataatcatttacttatgtaataagtaattatttttagtattaaaatattttttcctaacaacattttcaacaatgcattatacacacaattcctaaacaatgttcgtcttaaactaattaaatagaaggtaatattgaaattctcgaaacctaagaatttgatgattaaacttcttacatactcttcacccttggcgatttactatatagatatataacaatatgcaaactattcaaactattaactaatccatgactactatacactcataatttgagttaagattacagaaaaaattcttcgaatatgagaaaaccaataaaataattttattgaagaacatataataacaaaataaattatgtattagtaaaattaaataataaatacatcattaatctagaaattaaaagttgaagagcttacattaattattcagtggacacatggcaaatgttaaagtgatgatatatcaatcatatggagagagttggtcaactttcatatatatgattataaaaactattatatatacgtttttactgtagataattctttctgataaaaatataatatttttatgctcatacaatctgtatagtatagttttcgatattttaatgacttcgtcttgaattaatatttttatgctcatacaatctgtatagtatagttttcgatttgaaattttgtgtaattaataggttgttgagtcagctaacacatgcatgatgaggtgtctactcaaaatgacttcgtttgtatgttggtataaaagtttttaatttttgtgaaattgacacaaatgacattaaaaattttattattccaaaaatgacactttttttttaaactttcaaaaatagcacataaagtttttaatcttctaaaaattaattaaataataaagtttttaagtgtcatttgtgtcaatctcccaaataaaaatgagagcaaacactaatattaaattgaatcacatttttttaaaatagtggaaatatataccctaaattggaaatagagaactcaaatataataccacaaactaatattaaaatgaaaaatctcttttaaacagtgaaaatatatatcctaaattagaaatagggaacccaaatataatgccataaagtaatattaaaatgatcaaaatttcttttaaatggttgaaatatataccataaattggaaatacagaacccaaatataatattttaaatttatttctaatttattttggtttaataggttttatataaaaattgtgatattattgaaaaaataaattagtgataatacttttagaacaaaaacttcatagtaagtcaaataatgctatttttagaggtctatggaatgtgtgctattattgtccataaaacttgttttagtgctatttttagaaatttttcttatttctttgctaaaacaaaggactcaacccatcacgtctctctcgtaaacgaagcccataaccatttgatccaatagtattctttgagtcttacacactttttaattacaatactaatcgacggttgaaaatgaatagtttcttaagatttcatgttactttttaatattaatcagctttgttttttatttgacacgctattataatacatatcatgttattattttatttcacattgtactttttttaaagtgaaatggtatttttaatataacatgctaattttcaaaaagtacgttataaaatgttacttttgttaaaatctttcacatctatgtttttttctctgaagtgtttgtttttggttcgacttgttgggacatttttgtcttttattgtgacgtcatatgttcatttaccgataaaaaactgacaatagttatttactttattttgattcaaattttgattattttgtaatattacccaaataattaactaactatggattcaaaaaaattgggaaaataactacaattttcttttgtcatccgcttttagttgaaactacaaatcataaattttagaaagtgacgatttcaaaataaaaaactttaaaaatgtcctcaagctaaggaaaaaaaatacagtagcttattttaattagaaaaagagaattaaagtgaaatccacattaggtggatagaaaatcatcagaatttgagtgggtgcaaggacacttaaaaatcgcttttggaatctagacagataaaaattgtgagaaatgtcaaagcaaaacaaagttattgtagaagtttttgtcaatacaacaaaaataaaccactcttctcctcaaagcattcggtcgtgatcatcctcaaggatcaaaagagttgagcggatccttaaggatgatctcttgcttgttagcacttaggacttaatcatacacaaagatgaggaacatcacctctccccgattacacaatattaattatgcctatgacatcagttaaccgaatcaagttttttggtggttacttgtcaatggagttatttcaaagggtattatcaaaaattaactttggtttggttggttcaaaactgaaattaaccgaatacttttcataaaagtttttaaacaattcagttaaatttgaaaaaaaaaaattataaattttcaccgataatatttgaattccaaatagtaaatagaaatccttattttttaatatttaatttaataaatttgttttaaatcagatttcaatcttacaatttctattttgctatacacttcactatctatgttttcatagtaaaccgaaattaaattctacagtttatcttaatgatgatatttgatatctaaatagtagtcaacacattttttctatatctactttagtaatttttttaaaatcaaattttaatcttccacatattgagtaattttgacttttaaaaaaaaaaaaaatatcaaattaaatatcaaaatatttatagattactattttactactcaaaactagattttaacccgcagtataccgcatggctatatcttttttatttttttattttaacttgtttagtagatttaaaatatatatgatttaattttttatattttctaaatgtacaactcttatatctacatattatttagtgtaaaattactatgtttaatttttactgattaaaaatataggaagaataacatacagttcattaagctaaaatctagattataactatataattcaaattttaattatatctgttttattaatattatttttttgtttagtgtttaagataatataattgtattttgaaattatatctacgatttcacctatggtataccgtcttgtattactatcgacctaaacccgtcatattatctaatccctttcagtgaaattaaacatatctaatggatttcacccgtggtatagtgtctcatattctgtcgacccaaacctgtcttaccatctaaccccgttcaatgaaattaaacattattttgttattgtttttttagtaatactttaattgaaaagatatataatttaatcaatttaaatttcttacttcaaatgattatttaattatttaaaagttcatatcttataaatattataaacccgtcctaccatctaatcatgttcggtgaaattaaataatttttcttttgtgttttgtttaaataatacctttattaaaaaattataattcaaatcaatttaattttttttttcaaatgattatttaattttgtatagatttcacatattataaatattctatttatttagtcataatcttattggtttataaagaagcagtgtaatcacagtgtagtgcatagtttattacattaggaacccaaaaatgattgatgaaaagcacttgatcttggagagagtttttggcaagtatgtatgccggtatgttgttatgcctttttgtccacttgaattgaatcgactcaaacttctttgcccaccattgaatatcccgtatccagttgtagactccgaaatgtttctttgttccttgtatcagttcaaacatctccttgttgtctccttcaaagcagacttgtctataacctttaccccagcaatgttgcatagctatgattagagcttgtagttcaccttcgagagcgttatcaacacacttgccgatggccagacctgcaatttgatagctcccattatgatctcttacgacgcatcccgttttccccgacgtatccacattaatgaaggagccatcaaaattgcatttcaaccaaccccttgttggacgtctccaaccgttgctattatccgaagctcgcctttcgcagtcatgattgttgtatgttagtgaagtgaccgcgtcagtccactcttgcacatccgatctagccagtcctaagttgatctcccagggaacatgtatgttctgaaagtacaaaacattcctacttttccaaagtatccataatggtaaatgatggaactgttgtgtttgagttgtggttgccacttgaaaaatcgctcgtagtttatcatctagagaggaagtagtgtcagtgatgatgtagttgtggacaccggaagcgcgctaaattgacttagcatagtcacaataaaaaaaagaaatgcttcgtagtttcttcctcttgacagcaacggtgacaagttgtacgggggcgaatgtgccgatatgtcaacgccgctcctgttgctaagaccccagagcataatctccaaataaaatgtttaatcttcggagctgtgtgcaggcgccatatttccttctttaagttgatatcccctggagtaggtatcacatcggcatgataatttaaatgagttcttagccaataccctcatttgattgtgtaacatccctcttttgtgtagtgctatcccaatgtatcaccatttgcattggctgttagcttaagtttcagaattttagtgatgtcttcaggatgaacattttctcggagttttgcttcattccagtctattctcgcatcattgattagctcgctgaccaaaaaatcttggatgcgtgcattccttttcctaggggctgatggagggtgttgagggagccatggatctaaccaagcactcgccatggttccatcgccaatgacaaagcgaaccccttgttttattagattccttccgtgtaaaatggacttccagacaaacaaagcttgtgtgctctatgtagcatttagaatagtagtgtcaggaaaataccgaccttttaaaactctagccattagacaatttggcttttggatgatcctccaactttgtttcccaaggagagcagagttgaagtgttctaggtctctgaaaccaaaccaccttcattcttcgagtagcttaatctattccacgcaaaccaatgcatccctttactgtcttcattcttgctcctccaaaattgagactagtgtttatttgcaagcatgaagaaaagtgagtcgtcagcaaatagcagatgactaattgctgggctcctgttgcttattttgacaccttggatctgtcgttgctctatagcttgagtcatgagatgtgttaaaacttcagcacatataataaacaaatacaaggataagggatctccctggcgaattcctcgttgtggttgaatgtagccatgggttgttccattaattaagactgagaaactcactgtagtgacaaaaatcataatccagcaaatccatgtctctacaaaccccatgtatcgcatagtttcctccaagaaattccattcaagcctgtcgtatgcttttgttatatctgtcttcaaagccatataagagttcgcttgccgttttctaacttttagagaatggaacacttcatgagccataataacattatcggttatcattcttccgggaatgaatgctgcttggttttccgagatgatcccagagagatgaggcttcagtctgttaactaaaatctttgagatgattttgtagctaacattacaaagagttatctgtctaaaatccgccattgttgacgggacaaagatcttcaggatcaaacataagttcgtgtgattatgtgtctgttccaagtagttgtattcaaagaacttttttacctccatgataattgcaagatttatgtcttcccaaaactgatggtaaaaattgcatgtgaagccatctaggccaggggctctgtgaggtccaatagaaaaaacagctttttttatttcatcaatggtgactggtcttgttaaatcattgttcatatccgattgtactcttttctgaaatccctgaaaaatgtttctgtaatctgactctgtagcaggctttgacgtgaaaaggttgtaaaaataatttgtggccgccgctgctatctgcgagtttcctcgtctataaactccatctttatctataattgagatgattctatttctggatcttcgggcttgtgttgatgtgtgaaagtacttagtgttgcgatctccagtagctaaccaggtttttctgctttttaattaccaaaagacttcctcttcataataggatgcattaagctcccttttaagccgttctttttctgccactgttgcattgcctgtagcgatagctctatccaaagcgaaccagatagtcctgattttctcttctcaattgtgcatgtggtatttcttccatctagagatttgttgtctacaggacgttagacaatgagagagtgactcttggcggggttttgtattccaaccttgaataaccgagtcacggaattcttccttatccatgtgtcgaccatcaaatctgaaaattcctcaatgatcttcacattcatcagcaatgtgagtaattaatggccggtgatccgattcaccaaactcaaggaactctgtttctgattggaaaaaaagcgaatgccaagcattgtttgccattgtgcggtctaggcagcataaaacatgatgatcaccctattttccaacccatgagaaacgatcactagtggatttaaggtctgagaaatcacaagtacgaaccatttgtctcatttgcatgatagacgctttcggcttgattctacctccttttttctcatgattgcctaacagttcattgaaatcacccagaatgaaccatggctgaccatttttgttgtttgctagtctttcaagacgttcccagagattgttacgatgacttgggtttggatgaccatagacaaaagacaaatttaaacccacttcattactttgaacataacaatctacaagattaggggaattgaaagaaatagaaacattaacagaagacttccaaagtacaactaaaccaccacttagacctgatggtggcaccattacaaagttactaaaacccaactcacagcacttgcctcgcacatagtcattgcgttgttttgttttggagatgcaaattatgtctcagagatatttctgatttatctccttaaggcgtcgaaccgtcaagtctataccaagcctttgacagttccagcagagtatcctcatggaggatgagccacttccttcacctctctcacggacggttaccttctgattcccctggttctcattgacctctagcatgtcttctcgtttccacttaccacgatcattggtcacctcatcctcaggattgatcacaacttgagagtccataagagcaagaaggtgaatgggctctgaataagctgcgtagcttggattccctgggatatcaccacaagagttctcaaatattggaacaggattaaagagctccctgtcattcttttcaccgatgaacatatcataatgttcatagtcaacaagagcatcatggtgaggatcaatatctgacagaacttcatcttctgcattaacaccgccattatcttcttccggaactccattagcatgagcatcaactgcctgattttcgccattttgattccagatctccatgtgctcaacatcatcaatctcacggatgacgactccattgttgcgaactctgtcatgtggtgggttctcatcatcatcatcatcatcatcatcatcatcatcatcatcatcatcatcatcatcatcaccttgttcttctccctcattctgtatgaggcaagctcatgaatcgtgtgtcatcataccacacacttcgcaaaacctacggagacgttcgtaacagaagcgtaacaaggcattaacaccagcagtgaattgaaagtaccgttgaaaacgcaaaggctgagagatgtcccagtgcagcataactctcacaaagtccacacatgccgtagcctctacatcaaattccacatccaggacttgaccaagagcacgcccaataggttccaccactccacggttcaggaattggaaaggaattcctctaatttggacccaaaacgagatgaaactgtcattgaaggcccatggtccacgccggagcaccgtctccattgattcttcagtagagaaaatgaattgaaattcacgaccttcaatgatgcgaccatggactaggctagcttggccccaaattcgtggcattgatgcaacaattgactagaggttttgtcgccgaggcatgacagggcggccaaagagaatgaattggttttcagcgagtgcttgattcacaactgcttcaggcaaggcaaaaggaatttcatcgactcccaaattaagatcttggactgctcgtcggaggttgtcacccattttagagagtggtttgtaaaagcggtgtgggtagaaatttgcagaaatgaggaagagatgtgtgttgtaaatcctgtttgcaaatccatcgttaaatagatgtcgcaacataactgctgaagaggcatcacgatgaatcaaggattcaatcgtggagataaccgcacgggagaaagtggtgaagattagacccactccgccgggaaaacccttttgaactgtcgtcgagaacgtgacaagaggccagaaaagtaaccgttttaaaatcgccaaaataatcaccattttcagaccggttcaaaccctcaaaaccctcagttaatttaaatattgcaaacgttttttcctttaaatattctaaatgtttaattaactgtaatattttatcttttaatcatgtgtgtattattaatgtcctaagatttctccttttttaagtaattagaattgatagagatatattagataaggaaatgctattaattagaatattaattaattgaaaataattaatttcaatggcattccttgtaaataagtttcaatttgaggatttatttcataaaatagctgcaaaaatgtatatgtagattcaaatactatcgattaaaatttaaatgtatatattacacccgtctatttaggcgggccttattataatcttgatattatttttacacgtgtcatgattaagtgagttactaactattaacgatatatcaattataatgatatataatatatatatatatatatatatatatatatatatatatatatttttttttttatttttggtaatttaactctataaaacaacattatagtgaaaaaacaagttaaacaaattattcattcaaatatctataaagcatctgctcatacttacaaatccaaaaataaaaagtaatactaacttatctaaaaccaaaattgttttctattatcaagttaaagcatatactcatgttatattttattttaatcccataataattaatctcatatttttccttattattactcctttattaaacatattcatactattattcaaattagatatactaaaatataattaattgcatatatatatatatatatatatatatatagttgtaagaatttataaataagctatgaataagaagagtagacgtaaatttaccttaatgtatttcttcgattctttcactaatctcttatgcattttcaactttggaacatgtaaaaaatgatgtgtattcatccacataaatagaaaaatacaagagagatttgcaaaactgcccttattctaataactttttgtaaaaatgcccttttctgaaggccatttttaaaactaccccttctaatatggcaaatgactgtcttacccttactgaatgattaggtttcacattcgtttcacaatcaaattcgttttggcacaaacttcttcgttttggccaacgaatttttctctccgatttcactcaaaatcgccgacgaatttcctctccgatttcactcaaaatcgccaacgaattttctctccgagaaaccccaaaatcgccgacgaatttcctctccgataaacctgttcttcgctgattgattcagatcatttctctacgacgcaaacaatccccagagatatcgatagatccgacggtaaccgtttttataatcgattttatagtcgattttatagtcgattttatagtagatctgacgatgtttcataacatgttttgcagatggattcagagagtgaaatccttacattgcctgaacagatctacagagaaggtgatgaatctattgcactgggaaccgttcaacaatactcggattggaatttagttagtaaagtagaggaagctttaggcgagtgtttatttcagaagattagaagttcgtttcttggtcctgtagttgaattgggaccaaaaatgaaggctaagaagggaatcagattttctgggaaaatctttcactatctcatgcagcagagagtgaaaacaaaaggatcaactctttggtttagagttgattctcaacctatccatttctccttgagagagttctatctcacaacaggtaataaagttttacaatcatttttaaagcttaattaactgtcgtagaataatttacaaggcatttgcataactgtttgcgtagcttacaattgtttttaaaacataagtaagtgtcatagataatttacaagggattttaaaagcttttaaaacgggtttactttattaacaatcgtttaagaagcataagttagtggcagataatgatttacaagggatcctgtaaaagaaccatacttttgggctagtaaaggatcctatactcttggtgatctcgaagatcgattgtttttaaaacctaaggaaggtgaacctgctgttgaagatgaagaaaagttgtgtcttgctgcagtagtgttgactgaaggaattcttttgacaccatatggaaaagagaagatacctttgccaagattgcagcatgcttccgattttgagatgtacacagcccaaccgtggggtaaagaagcattcagtgttctatcaaattcaattctgagaatggacgagaaaacttgggcaaaagagaaatatgatttgagaggatttggactcgcgctaacaatatgggtgttgagcgcagttccagcatttggtgcaacatatggagttaaagataaggaattccaatctgaatctccattgatattgaagtggaaaagcactactactccagagtttttcaaggtcgtaaaccttgtaaatgatgtttctgaggtaagcttttgtctatttacagaattcttaaaatggtttttagatttgaagttctgctttctcaagatttgtaatgttattgtatcttcgcagatggaggtgaatacaattattggaaactcagaagaattcaagtctttagttcctgatttccacacagacgaaacagaattccaacatattttgggacttgttaatatgggctgcagattgaagaaaactgaatggaatacaagatgcgttgatgtttgtgctgcccttgaagaagtaggtcaaaacaaaatcaataacaaaatatctgatagcgagaagcttgacaggattttgacaatctttgaagatcttaacatgagagtcgagctgattgagaggattttggacattagaatggaggaaaagaataatcagagatctgaggaagatgaagaaagaaaacaagaagatgaaggactagaaagacgactagaggtaattgtaaatgtttctttaaaagctatttgaaaggaaagattttacaatgtattttaaaggttaaatacgtagtaagcctttacaatgtactcttttttttcgcaggctgaagaaggaggactagaaagaaaagtagaggtaattgaaaatctttacaagctattttaaaggtctactaattatattaatgattgacttattgtttttattttgttgcagaatgacaatgaatcatttgaagattcaatccgagagccaaacacacagtatgggagctatccgggtgatgatgaaaacgcccaacgtgatgttggtgttgaagtagctgaagaatcatcaaaagtacagtaatcttatatctctaaaagtcttacaaaaatgattagtatcctttttataattttacattttgttatcttttcaaggataagtctcctactccacgatcctctacaccaaatttcaatattttgtctgaagaaagtctggatgttcaaaaggataagaagagagttaggagaggaagaaatgaggttagcatttaaaaaaatttgtattatctaaccaagtgtttataatatttttttcaaatctttaaaagtttatctttcatgcaacttcagaacaagagagttaaaccaagtgttcatgctgaggataatcttaaaacaagaaaacaggttagtatttgcaacagtactgtttttaaaatttgtcaattgtcttgttatgatatttacaagggattttaaaagtacttttaattggtgttttttactattctaggtgccgagaaagaggcagaaacaagttgatagtgctgatgttgatgttccaacaaggaaagaggttagtatctaatttattatgattttgaaaattttgtttataaggtattttaaacatctgttttttttattctttttgataggcacaaaataagaaaaggaaaattattggcaatgatggtgataacgctgataatgatggcgacaatgatgattttcagcccgctccgcaaagaaagagtaagcggggtacggttccttccattcatactcaagcacctttcacaactgagaagaagaagcatccaattttgcatccatttgcgaaagttgatgccacaagacttgagaaattggcctgaatggaagaagtcaaggaaaaacaagtgagttttattagtaagatagtgagttttttttaataatggaagaagcatcattgttgactgttttgttgttgtaggccactatcaatcgcggaaaatattgtagatacaaagtggtttacaaagggattttaaaaagggttacatggtttataaacaattttaaaagattagaaagtggtaaagaatgatttacaaggtattttaaaaaggatttacatgacttgcaatcgtttttaacggattagaaagtggtaaggattgatttacaagggattttaaaagctattaaaagggtttaattgattaacaatcgttttagaagcagaacttagtgacatagaatgatttacaagggattttaaaagcttttaaaagtgtttaatttgatttacaatcgttaaaaagcataagtatgtggcgtagaatgatttacaaggtattttaaaaagggtttgcattttttacaatcgtttttaaaggggttttctaatatgataatttttatttttgttgtgtttagcatgttgatgcagctttggagttgatgaaaacgaggaaggaaagcaatccagaattattcaaaaacaaatcagttgtatttgttggatcgtctttcttaaatgtgattgatgagtcatacatggagtttttggataacaaagagggatttcagtttcagtctgaagaaatcagtaagctgataatagaggaagaaaccaagtgcatattggctcctttctgtatcaaaggaaaatgctgggatttacaagggattttaaaagttttgaaaagtggttaacatggtttacaaatcgttttaaagcataagtaagtagcatagaataatttacaaaggattttaagagctttgaaaagtggttaacatggtttacaaatcgttttaaagcgtaagtaagtagcatagaataatttacaagggattttaaaagctttgaaaagtggttaacatggtttacaaatcgttttaaagcgtaagtgacataaatctatcacgaaagcatatgtaaaagaggtaaacactaaatcataaccaaaatctattacgaaatagtataacaaattcacataagcaaatctatcacgaaacagtataacgaattcaaaaggtattaacaaatttacaaggattttagaaacaaattcaatcatcaaatctcaaacaaaattcaaattcgaagctgaagcaaatgtcaaactgtcgattgaatcaggattcaaataacgaattcacataatcaacaacaaaaatcgaataaaccaattcgaaatcgaagatttaagctaacattataaaatcaaacctgggaaacgcaagagattcgacggctacacacagctctacttacgacggcgaagatgggttttcacggcgagtaaactcactatttccgacggcatgggattcaacggcattcacaatttccgatggaggaagaagagagagagtggagaaatgaattaggtctgtgggtagctcattaagggtaatttggggagaaaagtattagaaagagtagaaatgaaaataggaaaaaagggtagagttgcaaaagggcattgagaaaagggcattagagtgaattattcaaaatacaaaacatgtcattcaattatttacttttatttttttggtaataaaaaagaaaatgttcatttttaatagagattattgaatgtggtgggaccacaaaaaaaaaagcatcaataattctaaaataagaagaattactttttctttaaaattttaaaaagaatttaagaaattatacaagcaatagtgtttttatttactaaatggaaacacaaaaatttgaaaatagtagttaacttatcagaataattttttgaatacttgataagaatataattatagttatacttatggtttattctaagaagtttaatgcatatatttataagtgaaaacaccaaatatttgaggaaaatgactaataagaataaatgtctgatacttgataagaatagtattatatttttatgttctatttattaagtttaacacatttcaaattagtttaatatgaggtaagattaacttatgagactacgtcatatagtaaaactatattataaacaatatttgttttccaaaataatttttagttttttttaatattaagcatactttgttattgttatttatttgaggttaatctttcacatatatttattgattgatacttcttcatgatctgaatggttaccaaagaaatgtgttcatgcctctgaaccaagtgaaggtgttacatattctgaaatatggagaaattgatgacgagtttaaacggtttaaggataatttgttttgggaaaaaagtgtggcggaaattgtgttttatggagtttgattgcaaacgaaaagactaagaaaggacggagttgtcgagtaaggattggccgaaatcagttatgtacctgggaatcatccaatataaaatagaaaaataaaacgtgatctaagtaggcttagctaaatagtgcacgtatggtaaatgaggactcttgtcagctttgaacgaccgagtaaggagtgaaaggcctttgaaaaccagagaaaagcaggggagtactctatattgtgcgttctattattgcgtcttatttccgagggagtagtcgtattaagtcatgtggcaatacccaccaaacaagactctttgatttttaggagcggaacctctatccaggggataattatttattgatctttcatgaagtttaagtttcatcaagttgagatcatagtattactatatcaaaattgttatcacttaagatgaagtatgtagaattaaaatcgagtttattatgatgaaatatatagttaaattgtatcgcaaaattgaatatgtaagatataatttttttcttctgaataataaatgaagtatacaataagtgtgtttgttactaattataattaaaaaatcatcaataagattgagtttgtaaaattaaaatgtgtaataaaatataaggatttagaatagttagagtttttctaaattttacatagttagagtttaattgaaaaatatatttgattttttaaaaaaatttcagacccaaaactgtttcaaaatgactcctagtcaaagatgattatttattgagtatttgaagtaaatatctatttaatgttttaataagtatgttgaaatatttaataattttaaatatttaataattttaaaattgcataaatacaaatgaaatattatgtaaaatatttgttttttgttatagaaatatttgatacgcattcaccattcaacaaatcatttaaactctcatatctgctagatccacacttgttctacatgatccgctttatctgctttatccgcttgatctgcattttccattaaagttaataagtaaatttgttatggtctaggtgtggaggatcgataaaactttataatattaatagatataaataatgaaattgatagagaagcttttacattttttatttaattatcatatttaaacaagcagttgacaagtttaacacattttcttctttttgttttttctaaataacctttttaactagtttcttttttagttgtaaattaacgatataacccattaaatattataaacaaaatttggtataaaaagtttgattatgttattttcttaaatatattaattttttggtcaactttttgcatatataattatacaataatttttttgccataaacaaaaatcttagttacataatacactctctgttaattttatactagataaagatggacgacttcataacaaaaataaaatttaataaaaataataattaataacgttgtaagtaaaattatctttcaaaagtaaaaaaaaatgtcgaaaaaatcgtgaacttgcaaatttggtacgaaaaaagcatgaactttcaaaatgccataaaaatcctaaactttactttgacattttgaaaaatgaccaactttcgttgaacatgccgttttgggcatgatgttaattttccgttaacggaacaatagcagagttgactttttgttaatagtcttcataaaaccaaacgacgtcattttgaattcactaaaaaaagaaagaaaactgagcactttagggatcgaacccgtgaccagatgatgaatttattgaacttgcaaccattgagctacaacatgattttcattatgatagcaaagagaaatttatatatacaattacctaaaataacaaaactaaaaaaatatttatgtgtatatacaatatatacataaaaatatatttattacgtataaatatacacaaaagaatctttattacaaatatacgcataaaaatatttattgcttatatattcttttatgtctatgtaattaacttttttaaataataatttaagatttatatatgtatatatatatatatatcaatatatacacaataaatatttttgtatatatctttcatgaagatttttgggtgtatatttatatgtaacaaagatttttttttgtttatattgtatatacacaaaaagatttttaacttttgttatttcgggtaacttgtatatataaattattgtttgctattacaacataatcatgtcgtgtctcaatggttgcaagtctgttatatcctttaattggtcacgtgttcgatcccaaaagtgctcagttttctttttttttagtgaatttaaaacgacgtcgtttggttcaacgaagcctgttaacggaaagtgaactctgttatcgttctgttaacggaaaattaacgtcatgcccgaaatggcctagtcaacgaaagttggtcatttatcaaaaagtcaaagcaaagtttaggatttttatggtattttgaaagtttatgcctttttcatcccaaatttgaaagttcaaacttttttcgacatttttcccatttatttttactgttgtattgtttcttttaccactaaaattattgattaaaaattatttgaatggaaaatatacaacattgattaaatccctttagatataaagatgattgatcaatgttgaataaaaaccattaaaacatctttaccaaaaaaaaaaaaacccattaaaacatgacacatgataaaatctttgtttgataactattgttgataatattaattatgttataaacatataatcatcagtgattatccatctagtttttgattttatttatataagacttagccattaagagtcttcctccccaagctcaaaacttcctcaccaagtcttttgttcgtatatatatggttgttcgttgttagtcatatgatataagaagaagagcaataattctctcgctctctacattattctctcgtccacttttctttgttattaaaataatattatttatttttgcgttatattttcgacacgtcatcagcgcgatcgtctctccaggtgattgtctaatcgaccgattatatatttattcaagcattttttgaggtaacatttaaattatattaaatttatttttattcattcatataaaattatatatgttattttcagagtatgagattatgtctcctccttaattgaataattgctatacctatttaaaatacaataaatggcttaataattgaatgattattatttatataaacaatcatgtcaaatctggctaagttcgatgtcgttgcccttgatgtatctgacaagaattatatgatatgggcatctgatgttaagatgcatctaagatcaaatgagcttcttaaaaccatagatgtatctgaaacgatatcagatgagagcaaagctaaagccatgatatttctacatcaccatctccacgaccatttaaaaaatgaatacattacaagagaagataatgtggatctacggcaatcacttaaagatcgtttcgatcatcaaaaatatgtgattttgccaaaagccaaacatgaatggctaaatcttcggtttttggattacaaaagtattggtggttacaattccgccatgttcggaatcacctccatgatgatattatgtggtgacaaagtgagaaattatgatatgattgaaaaaacgctctccacttttcatcctggaaatgtaatccttcaacaacaatatcgggccaaaggatatactcgttattccgatttgatgcaagtccttttggatactgagcaaaataatgagctcgtgatggtgaatcatttatctcgttcacctggattagctctactcttataagtgaatgttgcttcatccggtgatgataattaacaaggacccagatgttgttgaggtcgtggtcgtggccgaagaaaatgaagaagtttccatcccaatgattgcaacacgaaagaaactaacaaaaacattcaagtgaatgatgttggcctagttaagaaaaggcatgttgaagacacttgccacaaatgcggtatgaaaggacactggtaccagaagtgtcgtataccaaaacatttagccgatctgtatcaagcttcgcaaaaggagaaagaaagacatgttgaaactaatctcatatgtgatgagtcaggaccttcttttaaaggccaagatgatgatactcattttgatatggcagattttcttgattgatcatgacaacgagaaaattaatgtaatatattataactatatgtataattatgacaagtattatagatgtttttgttttctgggataatgtttttattttattatattatgacatatgaataatctatgtcaaagtattaatgattaaatattttatcttagaaaaatgtcaaaatacgagactgaggataaagatatatgtctggcggacattgcttctacgcacactatctttaaaaataaaaagtatttctcctctctagaaaaaaagactccgctagaagcatgagtactatatatagtcatgcaaagataatattaggttttggcgaacccaattttacaatgctaaggagaactcattttaaagtaaatgatgcattatattcccccaagtctcatagtgataagtttcaaagatatccaaattaatggatatcatatagagactatgaataaagatggcataaaatccgagaggcaatatatattagaaaatttgccaatgctatcctccagattatattgcataaaaataaatataatcgcattaaatgtcacagtaaacttcagtgacaattactcgaatgagtttactagtacatttaaaatatgacatgaaagacttggacatcgtggttcagtaatgatgcaaaaaaatgtacaaaattctaatggtcatccattgaaaaaccagaaaatatttaaatctggtgagttttcatgtaaagcatgttctcaagaaaaaatcataataaggtcatcgccaactaaaattgggaatgaaagacctgaattcttgtcgagaattcatgatgatatatatgggccaatccatccaccctgcaggctgtttcgatattttatggtattaattaacgcatctagtagattgttacatgtatgtcttttgactacacgaaacatggttttcgcaagattcattgtccaaataatcaggttaaagatacaatttcttgattatgccataaagaaagccagacttgatattgttgggaaatttacttcgcaagcctttaacgattattgtgtatcgatgggaatcgatatagagcgtccggtccctcatgttcatacacaaaatgacatggccgaattattaattaaacggttgcaacttattgctacaccgttaacattgagaacaaaactctcgatttctatatgaggtcatatgctatattacatgctgcagctttattcatactactagattataacccgcggtacaccgcggggctattgtttttcagtgaaattaaatattattttgttatttttgttttaataatactttaatttaaaaaatatataattcaaatcaatttaaaagttttctttcaaatggttatctaatttttataaagttcatatgatataatattataaacccgtcctaccatcttatcccgttcggtaaaacaaaacattttttttaataatacacttattaaaaaacttataattcaaatcaatttaaagttcttaataataattatttaattgtttaagattttacatattataaatattataaacgtgtttccgttaaatattctaaatgtttaataattataaataactataatttttatcttttaataaaatataatattaataatgtcttaaattttctttttttgaagtaattagaatttatgaaaatatattagataagaaaatgctagtaattagaaatattagtttattaataataattaatgttaatggtatttcttgtaaataaatttcaactctaagatttatttcacaaattactgcaaaaatatatatgtagattaaaaaaaattacccgaaaaccccatttattcaacacaaatcgaaccaaaccaaaagttttaggtaaccgaatccaaattaaaagaataccgatccctcagccgtaaaaacccgaaactgaaccacaaaacaaaaatctcggttcgggtcaaattcgcaggccttattagtagccgaagttgtgattcgtttgaacatatgccgcggataatatccagaaccagaagtttacttatcacactttttctctgtttcttcttcttcataatgcgaaccctaattcccttcttcaaatcttaatccacacactacctccactggatccgacattgacaatgacgtcatcactacctgttcgagctccttcctgggtctcttcccggagaattttcgaagagagactccaagaccttcccaaatgcgctaatctaaaccaagtgaaacagcttcacgctcagataatccgacgaaaccttcatgaagatctacacatagcaccgaagctaatctctgctctttctctctgtcgtcaaacgaatttagctgttagggtttttaatcaggttcaagaaccaaatgttcatctttgcaattctctgattagagctcatgcccagaactctcagccttatcaagctttcttcgttttctcagagatgcaaagatttggtctttttgctgataatttcacttacccgtttcttcttaaagcttgttctggtcaatcatggttacctgtggtgaagatgatgcataatcatatagaaaaattggggctttcttctgatatttatgtacccaatgctctcattgattgttattctagatgtggtggtttgggtgttagagatgctatgaagttgtttgagaagatgagtgaaagagatactgtgtcttggaattcgatgcttggtgggttagtgaaagctggggaattgagagatgcacggagactgttcgatgaaatgcctcagagggatttgattagttggaatactatgttggatggttatgctaggtgtagagagatgagtaaagcgtttgagttgtttgagaagatgcctgagagaaatactgtgtcttggtcgacgatggttatgggttatagtaaagctggggatatggaaatggctagagttatgtttgataaaatgccattgcctgctaaaaatgttgtcacttggacgataattattgctgggtatgcggagaaggggcttttgaaggaggctgatagattagttgaccaaatggtggcttcaggattgaaatttgatgctgcggctgtgattagtatcttggctgcttgtactgagtctggtttgctcagtttaggaatgaggattcactccatactgaaaaggtctaatctcggttcgaatgcttatgtgttgaatgcactacttgatatgtatgcaaaatgtggtaacctaaagaaagcgtttgatgtgtttaacgatatacccaagaaggatctcgtgtcttggaacactatgcttcatggtcttggcgttcatggccacggaaaggaagcaatcgagcttttttcgagaatgagaagggaagggattcggcctgataaagtcacgtttattgctgttttgtgttcctgtaatcacgcgggtctcattgatgaaggaatagattacttctactcaatggagaaagtatatgatcttgttccacaagttgaacactatggttgtcttgttgacctattaggtcgagtagggcggttaaaggaagcgataaaggttgtccaaacaatgccaatggagcccaatgttgttatttggggtgctcttcttggagcgtgcaggatgcataacgaggtggatattgctaaggaagttctggataatctggttaaattagacccttgtgatcctggaaactattcgcttctgtcaaatatttatgcagcagcagaggattgggaaggagttgctgacataagatcaaagatgaagagtatgggagtagagaaaccatctggagctagttcggttgaattggaggatgggatacatgaatttacagtgttcgacaaatcacacccaaaatctgatcaaatatatcagatgcttggtagtttaattgaacctccagatcctggtgagctggttgctgttcgataaactgcttagtttatgtccagatcattaggtattatatcgattataggctgtgagcatcagcactgtggcctaggccaaaaatttgtagttcattttccaaaggaacacaaagatggttttatccttgtaacgagttcgagtactgtatatagagcataatttataaatcttgagatcaatttgattttgcaatactaactcccgtctccagacatggggtttctggttcttaatccaataacaggttctgtgaccaaccttgaagatgacagtaacaagagaagactaggcaggaccaaagacattcaaactcccacataacctcattgtgagtaatattgtgacttcgtgaaaattccactgatgatgtattgtcggtgatgtattatcattggacgtcagtgtgatgacgtattgctggtgatgttacctttggatgaaccaactagttatttagaatgatgtttagatggtcaaattagaacaaaactcgtggggtttattttattacaagaatcaatgtcttaatgatgttgagttgatctcttaagtttcctttttgtagtgatattcccattgaaatagtaataaaataatggagaaaagaggaccaccaatagtgcttccttgatttgttccatccacaatagatgactttgatcataccaaaaaaaaagtctaaacccgttataatggtcattcacttgttcttaagacccttttatgaatgatccaaattttactgattcacgtaagaaaaaaaagagagatagaggattagagattatggggatgaagtttatctagttggtggatgtagtaattatacgtgctttttttccacaggagtgggtaagtaactgcagaggcaaaccttgagtggccactagggttacacatcatcaaaaaaaaggtgataaaagatttgtctcttatccaaaatccaaaggcatatggaaatgtttatctttaaatacatcaacaccttaaaggttacggtatatccattgcccattcctctgactaggacgacccctttagaacttaatacattcagcctgtggttcacagttctccactctcttatatttagatgttatttttctgttctaccttctcttcataggaactaaagtgaattgagtcagagaaaaagagaaagagagaaggtaacatggatgcttgttttcttacctcaagatcaatctctggtgttaaagagcttgtcccgttcatcaaagcgagaatctttacttgccccaagagaaattctggccaatttgttaccaggaaggttgcttctccgatctctgtaaattgtaagtaagatctctttcatggtcattttgatctataagaatggcctgagtatcgcaataacatgtcttggtttgggaatttgcctgtcttgagtgaaattattgtagctgatgagagcattttggtttgagtaggttctctttcggattcatggaagccactggaagatgatgctgatctcttcaaggattgtgtcaacaattctacatcagatgctgattggagggagttcagggcaaggcttgttgcaggggaacaagctgcaacgtccgagaaggatcagccctcgtggtctaacccggacatggtggtggactatcagccatcatcgtcctcactgatcacaattggaagcaaatgggcacacaagatccatgagccagagacaggctgcctcctaatcgccacagagaagctagacggtgtccacatcttcgaaaagacggtgatcctcctcctctctgttggaccctcaggtcctataggagtcatcctaaaccgtccatctctgatgtctattaaggagaccaagtcaacgatattagacatggcaggaacgttttcagacaaaagactcttctttggtggacctttggaagaagggttgttcttggtgagtccaaggagtggtggagacaacgaggttggtaagagcggagtattcagacaagtgatgaaaggattgtactatggaacgagagagagtgtaggattggctgcagagatggtgaagaggaatttggttggaagaagtgagcttagattctttgatgggtattgtggttgggaaaaagagcagttaaaagcagagatcttgggagggtattggactgttgctgcttgtagctccactgttgttgagcttggttcagctgtccaaagtcatggtctttgggatgaggttcttgggcttattgggcctcaaacgggctctgttatctaaaccttgtttttgtactgcatttcactaatggtttatggtatgactatgtgtatggtttatcaatgtactgtatgtattaaacatccatcactaatttatatttgtttgtttctcgtttaatagcctaaaaataattacaaggagattaagaaaaacatatgaaccttaataattactccatcttctaaactgtaatgtataatgatagtcacaatgccattggttgtcaaaacaaaaaaatggttttatcatgttcaaacgaagcatatacaactttggtacttgatacttgccttgtacttgcgagtcttcaaattttgtgactctttacccggcttgtctattacgggtatttgttttttcaaggcgagtactgtgcaagtaacgagtccatcaactttagaagatggattatattggttactaagaaaatctcaaaaagtcaaaatctaacaaatatttcgtgttgtatgaggttgcgtgcaacttcaattggatttcttagttaaaaaatagagtcatcaatatagattcagacggctgaatagtcttataaatatcttttatttttgtctaagtaaatttgaaaacactgcctatttttttgtgcaccaaatacgtcattacggagttgagcgattacaatgagagaaacacaatcggacattattcaaagtgcatatcagctaaatcataagaaaagaagctaaaacaacaagagtatatatatagaattgagaaactaaaagaaaaagtaaactattaaactcaaggtttatataaactcaagagcctaacatacaacacaatgatcgaaagtacttataaattcaatttttattcaagaaataaaatgaaagtgtcaagagagtctatgccctcattttttagttgtttctcacgtggtcatgagcttaacgacgctaaaaccaccatcaaccaccagattctgaccgctaatataaaccgaatcatcagaagccaaaaacaaagctgcttctgcgatgtggcgagctttaagcaccacacctttgagattccctagggcttcaccatattcttcaagcatcttcaccgcttcctcattgtaggcgctagtcatccccgtggcaaccccatacggtgcaacaccgttgactctaataccgtactgccccagtccagcacacgctgatcggatcagcccgagaagcgcgtgcttagaagccgtgtaactatgaggtcccggaccacctatctctgccgcaatactcgtcgtacatacaatggagccacgagtaccactagccaccatcgaacgtgccgcgtgtttgataaacgcagccgcaccgcgaacgttaaccgccatcgttcgatcaaacgcctcaagatccaaatcaagaacgcttccaaacgcttccaagaccccggcgttactaaacagaacgtcaagctttccgtgtttttcaacggtgaacttaacggcgttctcgacatccgtctcgtcggttacattacaacggtaaaaacttgctttgtctagccctatcgaaacggcgaggttttggccaagctcttcttgtatgtccacgatgaccactttagctccatggtccgtgaacaacctaaccgcttcagctccaatcccactagctccgcctgttataattgcgatcttgccatccaatcttcggtatatatattagacaagtaagtatattattaatcaacgtatgaatgaatgcaaaatgaagttgtaagagtttatagcaaaaaataaaactaaaaaaaatgaagtcgtacgagtttatagcaaaaaataaaactaaaaaaaatgaagtcgtacgagtttatagcaaaacataaaactataaaaatgaagttgtaagagtttatagcaaaaaataagactaaaaaaacgaagttgtacgagttcatagccaaacaaaaaatgaagttgtaagagatgaaacacttgcctaagtcccgacattgttttgttgtatttccacttttgaaaagaccaccaaaaattgaatgtatccttcttgagggattgcaaaggatatataatgttaaatataaccaagagttttggcatttaccatttaaatataattcaacgttcctcacgctcttaataattaaactccatatccttgtccagcaaaccttatatattgttgtcacttgtcagcatctataatatatagttttactataaaacaagagcccacaaatatgatcgtataaatgcataaatagtttaagtagaagtttcacatgggtttaacgatgctatatagtcaagtcaacatattatgtccgctattgacgggatatgcgagtggccatgatctgcttcttccttattggttacaaaattacataattttatcgatcattttactagctacatttggttactctatttaaaagaaatcaaaatttttcttttttggttaaaaaagaaagaattatatcaaaagtttctcaaatttcaatactttcatgtcgaaaacaaattcaacaaaacttggcacgatttgtactgatacgttcttgtcaacatctacaatatcttttgtgcgtgccttccacggctccagctaagcttacgtgtttgaagaataataattgggttgatagtcattgaccctaattatgagaatcaaactgttaccaattgtcgaggtcactgtcacggtagttgtcacgacgctatatgtatgatatgggttttaattatccctatgaaatattctctcgaataaaagatcgaatgtaatatttaggaatcaaaaaagatcgaatgtaatatttaggaatcaaattttacatagttcatacaacaaattattggctttcgaataaaactaaacaaaaatttccaatattaaaattacaataataaagtaattaaattggttctgtggaagaaggcgctagacttaaggaaattctttcagtaaatcagagttgcaaataaaacaacagataggttttaattaaggaccatataaaggtatacgttaatacagtaaaacctctataaattaataatgttgggaccgaaaaaatttattaatttagagaggtattaatttatcgataaattaataattattaatttataaagagattttataaattttgtattttttttacaaaactttgatataaaagtagtttttctttataattaatcattttttctaaaactaattacaaggaaaaaacaattattaagtttcaaaaataataaaaagttttttcgacgtaataaaaatattagaattaaactctacaaataattaatagaaattgaagaaaaaataatactagaatcatatttcaataaatattttacatataatattaatatatatatatatatgtatatattggtaaatttacataattattaatttataatattgatgggaccatatatttatataagattttcgaaaaagttattatcttattaatttatcgatttgtatcaatttttacactggtcccaactcgggaccggaagaatttattaatttatagaggttattaatttatcgagtattaatttatggaggttatactgtacttagatatataagggttttaaatgtaattattttactaataccctaattacttcatcgcttctgtatatatatgtgtagtttcacactctatcaaatataagaaatattcagcctctatatggtatcagagcaacatttctaaaaacctaaaacaaattgacgataggtggagaggctcatatttatatatactacttaagatcctattcaacttccgatgtgagacaatatctctaatacgccccttcgagatgatggttcttctagccattgatctcgatatgttcgggcatggatcagcgggcctaatattgagcctgaccgatgtggattaggttgagtatgtgcggatcgggctctgatatcatattagattgttggcttccaacctaaaatcaattggcgataggtggagatgcccatatcttatatataccacttaagatcctattcaacttccgatgtgcaacaatatacctaatagaccatacacttaaattgtaaaattaatcaattttcgttgcagaaataatttatgcctaaactagaattccaaatttctttgaaaatttaatagattagctagacaagcattaacaatcaagtttgattgttcaaaaaattcctaaaccatatctctttgcgattagttatttttcttacctaagattatttgaagaatcaattacactctcgtatcaactaattatcatataggcaatattctggatgatcaatctagaacaaataattaaatcaaatcttggtgaagataacaggttgttcagtttaaccattcattcaaaaccttggaaaattcataaacctaacaagtagattactcagacataatcaatgaaacacgaatcagaatctgaataaattgcatcaagagattcaaagatagagtaaaggagttaaggatcttctgtgataaagtctcattcatctctccaagttttgtacaaaatctttctccaaaataatgcatagctctaaacaataaccataaaaatcctaaatatagtctaaaatacttccggagactttttaatgcaaatagtagatttattgggacaaatatacaactcttcaagacttgttataacacgtgggagacttgtgttcgcaatgcgtgtcgaacgacaccacaagggtgtcgatagaaaaaatcacctctgatacgtccagaggtgctcttcatagctacaatgctccaaatactcgaaagtccgccaatagcgtacctgaacctacaaagactcgaaaagatacaaaagagagaaaagattctacaaacaaatgcttatatcacggttaaaaaccatgatatattaactcctctagacttaccttttgcttgccctcaagcaaaacaaaaatttaatccctgaaagaagttttaaaacgcagaaactcccatcctatctaagacatttcattgatcattcaaatcagaatctatatgcttaacagactgcatcaaggtgtaccaccatgcatatgtctgcatatattcacaacatcccaaactcaaaccaaatcccacaactttatccattagccctcatcattgagtctcatcaatgaagttaatgttcaaaaaccttctatactcatttccatacgtataccatggcaattcaactattctgcatcacattttggtactctttttctctcctaaacttattcgttttcaaatcattttttttattctacataggtttacttagagaattttgatatgggtcaaattgccaaaagaccctttctcaaataagaaattgttgtagcactttagagtcaaattttacaatagatttatatgttgtttgaattaaggtaaaacagaaaagttgtaaaataagacaaaaaaaacaatttaaattgaagtaaattcagatggatgaagcgttaggcttcaggaagtgctgagaatatatcataattacagatttagcaatattgttaggaattataaggaaccgttctagaactcttattaaaaaaaactataatcaagtctgtatggactatctatgtctaataattagaattccaattatcgtctctaaattcctaatatcaaacaagcattaacgtttaggttcaatatgtttaacaaaaagtatctaaaccactattgtatgagaatagctacttatgccacataagatgttcaaataataagtgcacctttatgtcaaatttattattctaagatcatcttctagttagctactctagaataagcgttaagaacaatcaaacgttactaaagagaatgtcaagctttccaatggtgaacttaacggcattcttaacatccgtctcctcggttacatcataacggtaaagaattgctctgtctagccctatcgaaacagcgaggttttgaccaatctcttcttgtatgtcaacgatgaccactttagctccatggtccgtgaacaacttagccgcttcagctccaatcccacaagctctgcctgttataattacgatcgtgccatccaatcttctatatatatatattagacaagtaaattaaaaaaaaaaaaaaatgaatcaacgtatgaagttgtgagagatgaaaaacttcccttagccccgacattgttttgttgtattcttacttttacatgtacatcactattatttgaatgtatcctttttttagggatttcaacggatatataatgttgaagataaccaagaattgtgcatttaacatttaatttacttcaacgcgcgtttctaatgctcttactaattaaatccatcaaattaacattgttgtcgttttcttaattgaatatatataatcaaatgcaatatctcaactaattgctttgatatctagcctaaggatgtacaaatctagacttttaattatagagtataattacctccaacaaaactttatatatcgtccaaaaataaaataaaagagaagattgctctatatttataaataactcaaaaaaacctaaaatagggaaattcaaccaaatccccaaaagctttaatccaatattttatctcttagttgacaatgttgtttgattaaaacgtatatacataaatataaaaacataatattgatacttaaacaaaaacttatcactatactattaaaatttagatgacttggaacagatccgaatgcgatatgatgtgttgaatttgcataattgaaatgatacatgcaatatgcattataatttaataatcgtgcgattcgacacaatgactcataatctatttcatcacatttataatttgaactcgttatcctcgctaacgtatacctattattataatatgaaaaaaggggtcatctgttatctaatctaatcatatatatgaaagaagcctaactctctcccacaacatgacacctcaacactccagcagttgatacatcagcatatattttcatgtatttacaaaaagatcattaaaagtaattaaacataatttgctccaacttttacataataaatcaattaatgacatttcagttttacctctttcgtctccttccaaattccaattcatccccttcgttttctttctcggaatcttactcgccaatctttccaacttcacattttgatatctatttaactcaaatctgtaatattttttaaaaattcacctccatcatcctacttcgcctacatgtaattccagtggttgtgggccttagtggtctcgattcatatagctcttctgtgctattgaatgcgtacagtcgacgattatcggccagccactaattaactgatttggtgggagttctgttgttggttgcttaaacgggttttcctttttttgtgggtgcgagcaaagccaaatttgcagtctgggtttattctttcaccatgaacacatatattgttgttggctttttccgataataaaaattatttttttgaatccagtctacaaatgtgtggcaaagctccttcatcttttatctcatgtgtgtgtttactagattctgacccgcatatatatgcgggatttcatattttaagaaatgactggaatacatttttagtgaaagatattgtagtgtataaattataatgtgcatagaaaagtgtataatgttatttatgatacaatagctaaatgttttaattaatttatattatttataatcctactatattatttgggaagtacattttaaatgtaactttaatttttgtaagtaattacatagatatgccattagaaataaaattttaaagagtaaattaatttatctctttaaagattaaaaagtcaaatactaatttaattaattaaatttaactaaaaatcgaaatacattattattttccaaaaataataaccaatcaaaatcaacatataagatttgatatctaaattttaattaattaaattagtatttaattaaaaaaacgaaatacgttattaatttccaaaaaagtaatcaattaaaatcaacaaattatatttggttttattttggaattgggttatatggtggatgtatttgaatcaatatttataaaattttaaaatattattaatatgctgttttaataaggattaaaacttcagttttttaacaattatctaatggatttgtggtatagcgttacctaataacaattataaactgtaaaataaaaatactttataaaaataaaatttgcaagttttaatatatattacttttaaaatatagagatatttgaaaaatctgtgtatttttgttagtttgatgtatatacaaattaattgtttttgtttgaaatttgatcaattagatgatataatgtgaaatttactctgcggtacaccattggtcgatttttttgtaactaagatttcaaattttaagttataattgttttgtaaatattgtttcttttgtttagtgtttaagattggataattgtgttaaaattgttaattctaagatttcactcgtagattatcatcccgtatgaatatcaacccaaactcgttccaccagataacttcatttcgtaaaattaaatattatttttattattttaatattcttattgtaagatattaaaaaatcgagggattgacttgtggtaaatcttggattaatatatttaaaaataatttgtgatttataaatttatgatattgtagtatataaaaccaatttttagtgtatacctttcaataattgtataaagtatattttaaaagtcaaaatttgtataaattgatattgcaacctcatgaaatcgtagtgatttacccgtagggtaccacaagctaatttgtattttttttttataaactgataaatttgttgattttagttaaaaataaaaaataaattaagttatattttttttttttattgtttcagattgtataactatattttgattgttaattccatgattttatctgtggtataatattgatcaacacccgactaatttcttttaatcaagtgttgaccctaaaagaaaaatccataaaaatatgcataaatgaatagtaaaattagtagataaacatcattagaacatgaagtaagttacttatgaatctctatctatttttctttttttaaagaattaatattctagattgattgtgaggcaatgtgaatgtatgcataacatttataatagatagattgtacgcaaaattagattttaatttggattcaatcttagctttactgaaaaaaactaatctgaattacatattttaaattgagaatgacgaaaatattttttttaaaattaaacttatccttatgcattatccttatgtattttttttaaaaatgttaaatattttaatctgtactgaaactattttctagataattacaaatctaaaatccaaaaattctcttttgaaaatgctaaatcataatttaaaatcattttttatgtgtactaatcagaagcaattaacatagttttgttaagaaaattgtataaaatctaaactaaatgataatttgttattaaattagattgaagtttctgaattatctaataacatattactaaaataaataagtttgcatatatccaattcgaattaaaatagcctgatatgttatggaaacgtttttaaatgatttccgaaaatattgggtagttattaatttattgatttaattcgattgtttttataaacaaaatttaagatatttatttatttgtagtagttgttaatttactaaattacccatgtaaaaatttatttagttagttttaaactacccttacaatgttgtagttcacaccatgcttcccaattaatagtatagatttgtttttcagattccataaaaaagactttagtctttagggttcaaagggttattgtgatgccaatgcaaataacaagtaagcctcagttatatcctctcaatgttttcttacttaaaatcaaaattagctaatatgtaccagaaagaaaaaacgcaaaacattaggactataggatatgaacggtaggcctgctaatatcattttctttgcatgtattgatccatgcatggtgaactgtaggacggtaggagaacaagatatatttaaaaaataatgggaagtgtattcaattctctacaaatcaacaacttacacttgtgtccaagaacttttacggctctattatttaaaatatgtatagcatgtttggattttatgatcactttagccacttacgaggatctcaaactaaatattcactttttaaactattttaagatgtctctcagcctctcgaggaatagatcatgctgaggagaaaatgcaactaaatcattgaatttatgtatggagagaaggtccaattacaaggtgatttttcatttttttttttttttttttataggtaacagccacgcttggtgatgacatttgtgcgttaaagtattttcttttaagtgtctttcaaatgccgaacaattttacagtaatttgcaaattcaagagaaataagaaagcctcccaaacagactacttgtaatgtaagttctcagctaagcttttgttcatgaagtagtaccaaaataattggtctctcgcttattgttctaacaatgacggtagacatgatcatgttgcagaggttacaaatgaaacatttaaacgcatttgcaaaaatgtcactaccaaaacccacctcaccaattacacacacagtcattttattgtgtagttaaactaactttgatcatcccttaaattaggtgagggctcaattatcctctttgatatgttttgttgctagtgtaaaacatgatgttatgtcttgcaagggttcgaacccttctcccttcatttctactcattaaaacatgtccaaacttttttctttttgttgccaactaaatattaggagcgactctgattgtaacctctcgtggatcaatctacattctcatgaatcttggactttctaaatgtactacataattcaaagaaaaacttgaataatatgaatttgtttgtgtttccgcaaacaaaatcttatgaaagaaaacccgcgcatagcgcgggtactcatttagtaaataataaattgaccaaattaaagttaaacttataccatgtaaaagaagaataaataaaataaacctatatacagtatatgacataattgtgcggtattttaagctgacgttgcatgttattctattaacctgatttctaagtgaaaatttggaaaattatcctaggatttgatggaacaatttttgttttacacaatcttaattagataaatcattttgatatgtctaaaattggtagtgttaacaaaatgatagaatgataatttaaacatgttataaatgttgtttaaacatgacctaccaaatttaaaaattgtttccgcaatataacatatctcatgttattttaaactgtttataaatattaatcatatcttaaacttttgattgattttaaatatatatatatatatatatatattatattatttaatcatttttaaaaattgaaacttaatatatccgataaaaattaaacttaatatagaacttttaaatttggatacttaataagtcaaaattctttttcattcatatttggattcattttaacttatttataatataattttgagtaattttttaaatattttagacgatatgagacattgaacacactttttatttaattgattgaaaattattgggtcatttctagggataaatcctattattcactttttcttaatctaactaaccagaatttgccacctaataaaaagagtatttttgcaaacttaattagaaaagtagtacatatactatttataatatgtaatatagtcatgatacgtttttttcgtgagagagagagatgtaagggagacagaaaaaacgtgcgagagagagaaagagtaggtcatagtttttttttgtttttgtttttctttcttattacatttcattccttaagattttaagaactaaaatacttgtttgtaaattttatttttttaaaattgatcatataaataaaaatctatgtttttttctctatcaattgatatgcattttgtttaataatttttaaattttattttactgtaattgtgaaactagagatataaatacaatctttacagcttaatctgtacagcgcaatcagtacgaagcaatctatgcggttgtatctatacagtgctgaaacaacccgacccattttttagaaaaaaaaatataattaaatattcccataaatatctaattaaaccgcaagtcaaaaatactattttatgaataaataaataattcgtccaacaaaaccaagaataactaacaatcctaaccgggttccaataatcaaaaacaccaaaaataaaacaaacgagttcctagatcatcctctcttccttgccatgattccacgatcacactttatctttacctgcatcaacaaaacaatgagatgcgtaagtattatcataaatatttagtgaggcgatcctcccatctacgagctatacacacaagcaaataaaaaggtataatcacgaatacaatacaaacaaaccagtcattgaacaattcacccaaaacacattcaccacacctacatatcatcacacaaaacaaatcacacaaccttatcgctcagataagttcatggtcacgcactcaccttaacaaaatgattctaatagcaattaaacccaggagagactctccttgcgtctgagacagtccagaaacgtcctgcaacaagtccacaaccaaaagcaaccttgaagcaaactggacaggaaaaaccagaaacaaaccgtctcaaagatgaaaccctaaaatacaacctaaccgttaactattcaatcgttccggtgaaatcctagctgcagacgtcacaaagctgcccaccaaatctcgtatcgatcggaaaacagacgagaccacgatctcagtttcaatctccgctggtcctaattcgcgtctgagaaaacgtatttcacgaaactgcgaataactcaaccaattttaatccaaatccaattctgtaaactggaggataacgataaaggacttgggaataattataccaaaattcgttacctttaaccacgatttgatatgacgaaactgatttctcccaaaccctaacgattctgctccttctccttttctctctttttctcctttataaaacgaaaagtggctaaccaaagccctaatttcgagtttccttcttttataggcacactctagggttttcaattaacccaaccaattaaaccggatgatttaaaaaacaaaccctaaccgattttccggttcacgggcgttacaagtgctatctgtacagcgttgtctgtacaaagctatatgtacagcgcaatcgtaaagaaaaacaaattttttagagagaaaacaaattaaataaaaacacataaccaataatacttggataatacataaaaagagttatacattcatcagtaatacttgtcactttgaaagaagtttaggtaatctgtacaatgctaatgtaaaatactaattcatataacaattaacacaatactataaatattagaattatatgtcggtttgagtttataaataaaactaatggttagctatatgaattatcaccaatcgcataactaaataatttaacaaagaaagttcatgtctgaccatatcaaccaaaacaaataatcatattgattcgagtagttgatggatctagggttactttctattaagaattcttcttggacatctttcacttaatgaattgtagttagattcgtgatatagctgctgatctaaatgggtaggagtggtattcgtgcaaacctattttcggaactaaggttacatatcagccttgcgtcataacgagcacacaccacttagttatagagctttgcaaacagaccaaattcgctttagttgttggtcgagatgcgatgttacatgcgttagttaagtaacgtatcatgcatgactttaaacattcagttttacgattacatgtgcacttgcagcttaactttgtgtaaatataaaggtgaaggactctcgacatcgatgaagtttctacaaaaatatatatatatatatatatatatatatatataagagaaattaagaaaacgtaagatagaaaaaaggaaaaaataaaaagaaagagacggtttgacagtcacggtaaaacattcaaagaagggttcaaaccggtctagaaaaatggttgacatctaaatctaaccacaagaaaaacagtgtgtcctagtcgtatccgtgcagatccaatctacatagtgaccaacttcggaagtgttggatatgggcttcgccccaaataacattccagagcccaacaaagattcaccaacaaaatcagtaaagggaggtgaaggtcagcccgttagaagaagccgcggcccatagcagagtaaaagcccaccttccagaaggaatcgacttatataggagtcccacatcgctcagaaaatcgtatcttgtaccatcattgaagtactataaatactgacagaaaaatatcagaaaaggacacttgagatcggacgggaaaagtacaagaatgttcccattcggagtcaaagacataagctcggcaatcgacttgtgtagttttgtgtttattctatctctcaaacgaggctcggctgtgaaaatacattctgtaaacggtcgaacgtcgagttcaataataagatcttcattctgtctgctactttcttcttttatatttgggtccggttttgtgtacgtacaggaagccgttttctgtccaaccataatgaaccataagactttctttacattgttagaaagatcacattgtcaagtttccagagcattttagatctcaaatctgagagcattttgtatgcatgcatctcgaataatatatatattatcaaattgaaacgcatgaccgtcgttagcatataaaatatctaacagtaaaattttcaaatatattatattttcaggagaaattgaaaatatctttttgatcaaaaatgtcaatatataccttttctaataaattctggtgtactagattttataaaactaaaaacaaaaatcgattatacccgatcaattccataatttttgaacatagtccaaaacttcttagttctgtaactcataaagaatttttctaatttttagatttagtttctttatttttctttagctgattcctattttcatggaattcaaaattttgtagaatgtattttttaattttagtagaacatatattcttatttatgcagaacataggtaaagtgtagaaaatataatctagaaatcatagatcatagagtaatccgtataatacatatacaaaaatttcgtaaaaatagagtaaactgtagaatttctaaattccgtagaacatttcaaattcaattctgaaatttttagaacatatgtcaattccaaaatgtgtagaacatgtacaatgagtaaaatacatgttctatattatttgttttcagaatttaccctaaagatagaaaacacattctaaatgttttagaaggaatttcaactatctcaaaaactaacaattttcgacgaaatcacaaaatttattctttaactcttcttcatctttacttgtcaacatgttttctgatttttattttcttaaaactctcttaaattttatttatccactactaagggtaatttattactaaaaaagtatatccaattttctctattttaatattaaatatatatttagatatgtaatttttaaaattatttttatgaacagtttacatttatattgtgagttgcaattgtgcctttttctaattaaaaatatatattttgaatattattaatatatgtacgtacctaagtatatttagaagtgatttaaaaagtttagtgtctttttagatttcaaattttaaaattatattaaaggtgaaaaatatatttatgaaaatttaaaaaaattagtgtctttacagatttcatctttttagatctcaacttttacattatatccgccactggatggctctgcatatatttagagcaatctttggtacataaatggatatatttgcgttacttattcctccataatcacatagacgggtgctcacgtaaaggttacacttagacataagcttttttttgtttgtcacaagacagaagctatttatgaaaagtatatttatttaaaagtgtctttttaggtttcacttctagaatacatccgccactggacagccttcatatatttagagcaatctttggtatagaaatcgatacatatgtgtgcgttacgtacttattgacggtgctcacgtaaaggttacatagaagctctttagtccaagccatcagggtaagagatctggagtttgattcatttctaaaaaaattgtgttttaagttaaagaaaaagcaaaactttcggcaaattcttcaacataattggaaataactacgttaataatttttgggattttagcatgcatgaacagaaaactttgatagtataaattcgattacatatacatatacatcaaaatatatcttaaaacattgacttgttttgtctagcagaatcgataacaaaaagtggaagctgaggatcggagctaaggcaggagatgaccctcacttgtgcaccaccaacaactaccttggaaggcagatatgggagtttgataccaatgcatgctctccggaagaactctttgaggttgagaaggctcgacggaatttctccgacaataggtcacaatacaaagctagtgcggatctgttgtggcgtatgcaggtgacaacacaaagaaaacatgagctttaaattggtcaagccatatgacataactttattgttttttttattaaacagtttctaagggagaaaaagttcaaacaaaacattccgcgggtgaaaatagaggatgccgagaaaataacatatgaagaagcaaatatggcacactgagaagaggtatacactatatggcagcgttacagtctgatgatggacattggcctgctgaaaactctggttgcatgttcttcaacgctccctttgtaagctgcacacttaagtaccctcttttttttgtcattagatattatttagggttcatacaaaccaaaattgcggaaaattgtttacataagtaacatgtagcgtttcgacacaaattttttgtgtcaaatagtccgccttaacatttgtaaaaagaattatagttaaaaggaagaaaaagaaaaacaagaatacactaacggtgcaaaataatatcaggtcatatgcttgtatatcactggccatcttgatacaatcttctctcaggagcatcgcaaagagatgttgcgttatatgtaaaaccattaggtaccttactatataatttctctttaaaattttcattagaaagtataacatccaaatttgagataactaataaaatagtttttatgtgggtgaaactgttattgaaaaaaattgattatgtctcttcttttttttggtaagattgatgatgtctcttatgaaacattagagacatattccctccaatataaattatatgatctgggagaaagaaaatagaagaccaaggatgatttctaaacacaacactttctcttatatgtacacacaacacacaagaactacaaacatttccctcgacaaaaataatcacaaacaatttgaattaaaagccagacataactcattatatcttttaatcttatccatagtttttgcctaatgacttcaatattttttttttataattcttttccaatgaaatcctatcatcaagaacgatgatggtgggtggggactagacgttgaaagccatagttcaatgttctgcacggtcctcaactacatctgcctacggattatggaagtggatcctgatcatgatcgtaaaaaaagtgcttgtgcaagggctcgtaaatggatcattgaccgaggtggtgctacctatacaccattgtttggaaaagcttgcctttcggtatgtcataaaatcatcagctaaagttaacctttcttgatcgtcatcttaatttggtagtaattggccctaattaggttcttggagtgtatgaatggtctggttgcaaacccataccgccagagttttggttatttccttcttattttcctattaatggaggtttggatttgaataatcttatatttctaatctttttgaatatataattatttcattatacgtggtgctattgatcagggtttgaccgttggacttggagtgtcctaaccttggatgaaataatataatttcgtttagctccttaattattttcctatacgcgtgcaggcacggtttggatttatttccgtgatactttcatggcactatcttatttgtatggtaagaaatttgtagctactccaacacccctcattctacagcttcgtcaagagctttatcctcaaacttatgctgatattgtatggagtcaagctcggaatcgatgcgccaaggtaaaagtttaagtcaaatatataactataatgcattgtatgcttacgaaaaaagtaaggttacttagctattcaaaaatgtcatgatgatgcaggaagatctatactatccacaaacatttgtacaagacttgttttggaaaagtgttcacatgttctccgagaatatcttaaatcgatggcctttcaagaagctcataagagaaagagctatccgaagggctttggaacttatccattaccatgacgaagccacccaatacattaccggtggaggtgtgccaaaggtaaacggtataagaatcaaaaatagaaaaaaaaataaaaaaaaatacaaagaattaaaaaacaattgtaaagagaaaccaaaaagttatatagagagattatgaaccgatacttttattaatcacttagggattcatatttatacatgagttagagaatctagttgacatatatgattgatctctctaagatatttataccaaaactatgtatactgaatcttataatatctatactaataagttatatggttaaaaaaaaaatgttttaggtgtttcatatgcttgcttgttgggcagaaggtcccgagagtggttactttaaaaaacatcttgctcgtgtctctggtttcatatggatttcggaggacggcctaaaaatccaggttagttcatttttatttggcactaatgcgaattcactaatgtatagagtttgaactctaaatcattttttcgagataacatcaaattatttccataatgtgtagagttttggtagccaaatatgggatacagttttgttgctaaaagtcatgttagctgctgatattgatgatgagataagatcaatgctaataaagggatactctttcttgaggaagtctcagcttatagagaatcctcctggttactatatcaaaatgtttagagacatatccaaaggaggatggggtttttcagacaaagatcaaggatggccagcttcagattgtacttccgagagtttagaggtgtgtgtttctctatcattcaatcccaatatattgatctgattactaattcccgtgtgtggtcagtgctgcctgatctttgagagcatgccttctaatttcattgatgagaaaatggacgtggagaggctttatgatgccgtcaatatgcttctctatttgcaggtaattgttacgagaacactttagacttatatctagtaataggagccgtagctatagtttgagagtagaagaagattaaagcaaagcttcctcttaacccaagtctctcttagaaaattaggttaattgttggaagttcggtttcttattgattataagaggaccttatatagttcctcatacaaaccgacttaacaaaattaaaaggaaaactcccaaaaccaaaacacctaaactcttatcacatatcattcatttttttttatattaattttaaacaccacaagctgattagtaacacaattctcattcaaccaaaaagaaaacatacatttctcttattgacagagcgaaaatggaggtaaagctgtatgggagagagcgagtgggaaaaagtggctagaggtagtaatcatttgttcaagtttcatttttatttggatataaatgaaaaatatgatttcaaatattcaaatgcagtggcttagtcccatagagtttatggaagagacaatactcgagcatgagtatgtagaatgcacggggtcagcagtagtagtgttgactcgcttcatgaaacagtttccaaggcacagaacaaaagaaatagaaacatttatagcaaaggcagtaaaatacatagagagtttgcaaatggcggatggttcgtggtatggaaattggggagtgtgtttcatatacgcgaccttctttgctgttcgaggtttagttgctgcgggcaagacttaccaaagctatgagccgatccgtcgagcggttcaattccttcttaagatacaaaatgatgaaggtggttggggagagagttttctctcttgtcccggcaagaagtatatttctttggaggggaataagaccaatgtggtaaatacgggacaagcaatgatggttctaataatgagtggtcagatggagagagatccattaccagttcatcgtgctgcgaaagttttaatcaactcgcaaatggagaatggtgattttccacaacaggtatgattcttgttaacctagttttgctttggacatctagtttcacgataatataattgatcatcaatatactatattttgtaggaacttagaggagtttacaagatgaatgtgctgctacattatccaacctatagaaacatttttagtctttgggcactcacatattacacaaaggctctacgcttgctcctctaatgacgactcgactgcgaaaggcgaaactcatcatcactgttctatgtaaaaagaaatcaataataaaaatacaacttgcgaaaagaggaatctctttctctagtcgttcatgtcttccgatcgtttccattgttttcatttgcttttcacttttggcttttgcttattactcttagtttcgttttgtttcgttgttcaatctttatataaggcgacttctactctattttttttctaaacacaattaggaattaggatcttaaagcttgctagatttaggggtcagttggtaatggttattacttttggctatagagactttaatggcatattctttgattgtagagactttaactatttatatcagattggtaacaacaacaaaaaactgtataaacttaggtactgttttaacattgtttggaaaagggaactcaaagcttgttagatttagggggtgattggtaacgacagttagtttttgatgtaaagactttgactgtagagacattgattattcaaatctgtttgactgttcaaatcttattgattacaaaaaaaaaactctggatagtgcgaccataagagttgtaattataaattataccgaatataaaccagaattgtaacagaatgatgaaattccagcaaataacttatgagaaggttttatacattcagttttttccattttcgcatcaaatttaatatttgattcttttttctataaagaaggggatctaaaaagaacatgaaaaaaaattgtgaattagttgatagtttaaaaacaaaaaaaaatagtagtgaatttgttaggaagttttcatatattggagaagagaaaaaaaaaactattgatgtatattccttttatttttgaagttaggtttacatgtctttaagaaaaaactgaaaccaaagtatctaaaaaaaagggactataatgacttttaaattaataaaagccaaaaagtgttattgaacaaataaagactttaattttttttatcgtacgctttgaaagtgcttgccaattaacccttgagaaattttgctgagattttgtactcgccaatcattgcgagttctcagttgagtcatgagccgtgtaagaagtaccaaagcttcttcgattgacagatgctgacaatggaaataatgttgatagcatgacgaacaaaatcgtgtatatttagtatttacacttttgttgataacacaatttgttaggtttcaaggttgttgaatatcgtaactatatgaagctgtgaaactcagtatgttgctaacaatgaggggaaaaagagagatgacatgcctacaatcatttctgcaagagttgggtaagaaccactagggaagggtaatgtacagtgatattcacaatgccatttatttggccaaaaaatccgttttggcatgtttgaacgaagtacatactttgatatcatttcatcatataaattttcgaagaagtcaattaaaaccgtgttgtatgataatttgtttgggaagtctgtctgttgggcgtagcccaattggtttacatagtagtcagaaatgcaatcggcctgactatcactcggtattagtcggaaagcatttcaaactcgagacaaacaatgtggttccttcggagagaagtccactctaaaacactttggtgcgtttttactgaggttaaacagatcagtctatagaatttatcaaaaaaaaaaaaaaagttgaggttgtgtgcaacttaaattggattcttaattaagaattagaaacatagctgtgcatgtagtcttagaaatttttttgttgatgtcaatgaaatttgaaaacattttttttttctttttgtgcaccaaccaaatacttcattccatggttaaaacgatttaaaacacttcatggaaattccatggtttagatattataatgagaagaacacaaaccaaagtacaaccacaactcaaactcaatgtaaaaggcccaagaagaggccatattaactcaagagcctaacatacaaaccacaagtatcgaacaacttattaattcgatgtcagcttaacgacgctataaccgccgtcaacccccaagttttgaccactaatataaaccgaatcatcagaagccaaaaacaaagctgcatctgccacatgtcgagctttaagtacaacacctttgagaatcgccgtggctgaacagtaatcctcaaccatcttcacagtttcctcgttgtagctagttaaccccgttgctactccatacggtgcaacaccgttgactctaatcccgtacttccccaacccgccacacgctgatcgaaccaacccgagaagcgcgtgtttcgacgctgtgtaactgtgaggtcccggaccaccaatctcagccgtcacactcgttgtacaaacaatggagccacgagttccactagccaccatcgaacgcgctgcatgttttataaacgcagccgcaccgcgaacgttgacggccatcgttcgatcaaacgcctcaagatccaaatcaagaatgcttccatgcggttccatgaccccggcgttactaaacagaacgtcaagctttccgtgtttttcaacggtgaacttaacggcgttctcaacttccgtctcatccgttatatcgcaacggtaaaaacttgctttgtctagcccgatcgaaacggcgacgttttgaccaagctcctcttgtaagtcaacgatgacaactttagctccatggtccgtgaacaacctcgctgcttcagctccgatcccactagccccgcctgttataattacgatcttgccatccaatcttctgtatatataatagacaagtaagtatattaatcaacgtatgtatgaatgaacgaataattatgaatgcataatgaagttgtaagagatgaaacacttgcctttgtcccgacattgttttgttgtattttcacttatgaaaacaccactaaaaattgaatgtatctttattgagggatttcaaaggatatacaatgtcgaagataaccaagatttaacattttaattatttcatcgttttctcatgcatgctttcaaatcttaatgatttaacaatccatcaaactacatcattgtcgaatcaaactccagctaaccatactgttgtcgacaagagcacaaaagcatgaaaataataatatgatcattaagtatagggttttctgccaaaaaaaagccaacttgtcaatttctgctaaaaaatacaaatcaatgagacaaaatcaaaataatatgcaatataacatgttatcatcacagtaagtttgcaaaagtttgataaatagtactcatgatcgtttgaaacttttggtatatcaaaacaaaactttcacaataaacaatgaagagtttaaatctacctttagaattttgaaagtataacgtatataatcgttaaaaacttataaaaatatttaaacaattagattacgtattattatttttttacttcataaaattaatttttacttttagatatgaaaggtaaaattgtagaaaatgacgattttaaaggttattgaacgaaacttgggttcactcctaggggtgaatccttttattcacctccttttgcattaaccaataaaaacatgtcatgttaaatcctatttaaattacataataaattaaagctataattataaatccaaaccgatatataatctcgtttaattataaaatctaaaccctaattctcttttgtaaacccaaaccaccatctaaactcatttaatcgtaaaaaaaactaaactctaatcgtattttctaaatccaaaccgacatttaacctcgtttaattgtcaaatctaaatctgtttataaacctaaaccaatatttaattcgtttaattataaaatctaaaccctaatcgtactttctaaacccaaaccgatatttaacctcgtttaatcataaaattttaaccctaaccttttctaataaacacaaaccgatacatattttcgttttaatggcaaattattaggttttataattaaattaaattctttttattattattaggtgtcagattttaattgcttaaaataaaagaagtgaatataagagtttacccatagggataaacccaagtatttttcaagattattttgattgaaaacctttaaatataaggttaagtaaaagtttcgcatggcttataactaacgatgctatatatagttaacagattctgtccgctagtgccgggatataggagtggcaatgacctagttcttccttagcgagatctccatcggcttttgatggtgttaagttctctttgcttgccatttgatttaaaaactatttcatctttatcattttgcaatgcttgcaagccttcctctacaattgttcaaacaataagaaacactaactttgggtttcttaagctatagtaattagttcttttcacggccttgtttatctctcatgtatggagtgtacctcgcccattaattcgtttcaatggttttcaatattatatacattttagggtatcgatcattttactagctatgtttggttactctattataaagaaatcacaagtttctaaaatttactttactttcatgtcgaaaacaagtttaacaacacttgtcacgtttaatactcacctgttatatagacatatagttacgatattgctatctaatctgctgtatatttatatacaagtaaatattattgatactataatgaactacgttattgtaagcagcctacaatattacatttgcatgccttccacggatccatctatgtgcatgccttccacggatccatctatgtttacgtatttcaataataatattcaaacacgaactgaaataactacgagaattgagaaactgtcagcaattgttgaggtcactgtcacggcagttgtcacgcttgaggcaacgctagaggcagttgtcacgctagaggcaactaccaagtcatgaaaacatctaataatttcgacactgcttatatatggcaaactcttccgaaagtgatatgtcaatgtactttaacaaaaaaaaagtgatacgtcaatgatcgacttgtcgtaaggccggcccaaagcaaaaaaaaaaaatacttatcccatcataaaacttacaactaaatattttttataaaataaaattattgagtttgaccgaaggaaatctttttttcaaaagatgaatttaacccgatataaatcttacttcttacagatataaaaattttcgaagttgaacttccaaatttatagaaaaaaataatattttcataaaaaaaaaatactataaatgctttaggagagaaagaaagtctggaaaataatatctctaaattattttatagatatatttgatgtctaaagtgcgtctgggttgggcatgtgtcgtacttacagttaactgatagaaatgtggatatcgtgattgcttttagctagttttgaccaatatcatttaatgctaggcactcttgtatacaattctttaaaagattataaaaattttgaaaatttctagaaataatgatagtcagtaggagtatatttgtgttttgatcctatggtatataaagaacatcaattaattgggattttaatgacaaaaagttttgactgatccattttaaaatcctcaacttattttttaatagaaaaacctctcaactaaaaaattctaatgaaaaaaaccttcaataaatttataaaaattgctagtgtagatttaaaaatttcaagattgtgtgaccgttttctattattatgcttatatttatttcaaattaatttagttgctaaaagtatacatgaatttatttattttcattttttaatgtaatatatgatatcataccttaattatattgattcatcatttcaattttgcaatctactgtaccacgtttttaatgctattttaaaacaaacatgatattctcttatgtctaaaaaaatatacatatcatcttttaataaatcaaaatacaataatatttatttgataacatcatttaagattttgacaatattatagacgaatgaactttttggttaagagatctttacttgctgggtctaaaatatatccgaaaacttttttggttttattttgtttatagtttagaggttttaaatagatggattagtacttaagaggttttgtcacttaaatcttttagttaaggaattttttcattaattatataattgagggttttaaaatggatttacatatacttgagggtttgtttcattaatattaggtgagtgtccgcgctacgcgcaggattttgttgttgttttttttttgtttttttttataatatatttagtttatcattcttttctacaaatgttattttataagaaagattgtattacgaaggatgaaaactatatattttttattaagcactgcatattgtttgttaatttttactcataggtaaaagctttgagtgtgttgatgaaaccgcatagtccggtgctttgaatagtaactaacgaaattacatatatatatatatatatatatatatatatatgtgtatgtatatatttttgttagtatttgaactgtaccgcatttaatccatagtttagccacttctttttatttgagcctaatttataggtgtattatatatactttttgtttagtattagtaagttgtaaaggattatagaaaaacatcatttagcttactcgtgcatattttaataaatttgattttgtttttaacattcgttttgctctcctctttgttattttgtaaaattgtattttaaaataactattatttttctaatatttgctacttaatttgttcatattttgatttcttaccctatatatattattttattgaacatcaaagtcgacaatttaacatgtatacatagtatgttaacatgtatacatagtatgtaattgtatactttgaatttctctttctctatctttagccatatatattattttatctttagccatgttgaattttttgacaaaagggtggtccgtgattttggtgtgtttgatgcatggcctaacttcaaacccttgaatttgtaagatcattccttcttggaaaatactattgtatttttcaacaagtgatgaaggaatgaagcaacgaattaaggaattctgtttagaaagatgagaagataaatatatgatgagtatgatatgagatatatgctagtcattggacaattataccttttcatcaagcaggaggagtgagtttccaaggaatacatcacggtcgttggcggtacgtatttcagtatgaacttcccacattctaacaatatggccaataacatgttggacgtaagttccaagttgcaaatcgttaaatgcaacataagtagctaaatttagattagagagatttatgagagacattgtgattttaagtgatatgaaggtaaatttttgtttgagtatttgtttctaaagtatttatacaaagtaagaaatagtgtttctaaagatgttttggtttttcttgggaaattaaaagaccccctttattgtagcattaacatagcactaaccgtttcttttatgtttaaatgtgaaagaatttgagaattatattaatcataggacattaaagatatgtgagtggaatatgaagaaggatacgtttaagttaagatagaagaatagaattcagttatccaaaaaacatcaaattaattacatttatatgcaagaatttatatggctcttttatttaaaatatattgaattcgaagacgttgaacaaaacatgggttgtttttggcttttatagtcgcacgtttgacccatttagccgcatatttctaatcattattgttagttaacctcttataatctaaacatggtaacatctgtttttactatacgatattgctatatgtaaactctattaaaaaaaaatattgctacatagacgatttagccgcatgtttgacctattttgtccacatatttctaataattgtcgacactttaaaacgtttaaaattaactttttgtgatggtaagtggtacgtataacaactatttttactatgcagtctttatataaaggatttagttatacagcaaattttcagattttcagatttttcatttaaaaaatatagagaatgatgattgaaattctgatttatgataggttcatatgttgaattaattactaattatgttttacttttttttaaaagtctagctggcaagctctcatgtgctgatgtgtcaagttatgggagagagttgaacttcctccatatatataattgtcttaataattataagatggattctctaactttaggatatgataatgtgggtgattggttggactgtaattgtaaattaattgctgtaaatttttaggtgcagatgtgttagctataacctgtagatgtagggtttttgttgtaaaattttggatgtaacttaagaaaaaatgattagtaattattagttatatctagttattatataatttttaaaaatattatttgaaatagttaaattaaaatcagaaataaaagttatattttcatttttctgatagaatatatatattataaaattgatataaacattaaaaaatattacttataatatacatacgtaatgagaaaatttattaatatgcccaatatattcttttatataatatagatggttatgtgtatatttgtcattgttgttttcagcttattattattatttgttgaaaaatatctatttatttatttaatagttagtgtatatatatatatatatagagataaaagtatataatatgttatgattggatgagaaaacaaataaaaagctgaatattttttctaaaatttctacaggaaaaataataagactttaagaaatattgtttttacagcttaaaaaagaaaaaaattagaggagtaaatggttgggctgtatctttatgatacagctccaaaaaaacttaaagctctaatttcgaaccaatcaaactttagctttcctaaaaaatctcacagcccaaaacaacttttttagcttttttagctgtaacttttaaaatttttacaacacatttttttgtgctttaacaggtgtagacattttttttatataacaatatttaattctctatttacaatatttttattaatataaataacataaataaaaagtgacagaataatatatatttcatttagttaatataaaatttaatattataatatatattttcatcaaaaattgtataataaatatatgaaacttattattattattaaatatttcatttgtaatcatattttatattgcaaaattttaaaattcataatattgaactatctttaccaattaggcattactatcaaaatacctatagaaaaaaacttacaggtacagcaaacatacttacagcaaacatagttacagcaaaacaactacagcaaaaattctatatctacagtccaaccaatcaccttgaaactgtagattttaaaaaaaacttaaagcttgattgacacattttaggattgtagaaaattttaatactgtaaatgctttttacagcacaaccatttatgcccaatataaggcttcatggagttttactgggaagtcgacaaagtatttaaaacacatttgacccggaaatagaagtataccggtttttaacttcagaaacgtatgaaaatatcaaaatatattctgaagtagttacatatttctcctctttatatggagttagccatgttcactatttaaaaggaagagatatttttttcttttatcaaacgttttagattaataagaaagaacaaaaactacactccacacggggaggaaacgttaataagcaagagagcagatttcgctaaagcatctgcttctgaattgttcaaaaggaagagatgtttatgtgttttggtcaaaaatatcgccgttttgtaagatgtcttttgtgaataggattgggtgcagttttaataccgtttgttgaagaagcagaataaatgcggttcgtgtgaaacgcatgacactggataatgtgtgattgttacaattgcgatgcggatataattatatgaatattagctaattatttttaatacttcaagtttcagaattgtttttaaaaattgaagaaaatgtgtaagtttgtgaatttatttatctgattttttttcttgtattgagaaaaaaataaaaagcaatataattgtacttaaccacaccaaaatgaatagatgctaaacatctggtgggcattttaaccgaaccgaaccgatcgaatcaaccgaacctaaactgatccaaaccaaacccaagcttagattcaaaccattgaattgtgtttttttctcaacccaaatgggtcggtttagttcactttaaagctaaaccaaaccgataacccaatgtttttatttaattagttaactaataaattatgttgattatattttaaataactaaatatgtaattattttcatggttaatttcaatttttcattttaaaattacaatttgaacatgttgcttactttactatatttaggtcgttcgttttgtcgttccatgtagttgcgattgcatcaaacacaaggatatatgttcatttgggtgctgcagctacttgcgtcaaaacgctgcggcgaacgcagtggaatccgacgaataattttgaatgccgatttaattgagcggcaaagattaaaacgttgtgactaatttaacaaatgacttaattacccataatatctttaagaaatcacaataaaacttaaccataaatccaacacattcacgcgatatgaaattatctcttcttctcttttacacaatctaaaatctcttttttttttacacgatttggatatgctcggtgatttcaaagtaagctctgcgatttcaaagtaataggttttgtttctgaagttcctttctcgatcctgaagagtttttgaagaattctctggttgaagttcgctgcttaaatcgttatcttcgaccccacttgttcttcttgaatctttatcttcgatcccacttattcctatcatgtttgccttctctctactctttattttttgtgaccttgaagagcttcaaagcaacgtgtgtctaatgatgtggttttagttgatttccattatgattaaccaaacgtagttgtgttgtagttgttcatagttacatagatttgggggaggactcgtagaagaagaaggtaaagaaggagaatcacccaatccaggtagaaaagcaaggtaatttcgttattcacagctattgaatattttggaaatttttgtttgtgttctcttagtttgtgtagctactctcaacttggtgggtttttttcttccgttgaatctataagtattcatggagcttgtcttctcattgattcataaatctatccttatttgtgttgctttgcagaaagtcttcaaatttgttaaagtgaatcagttttcttttttagtttttgtgttctctgtttttgtgatagttttgattttgattcaatggattggtttctaatgaactttaggacgaatgattagccctatttatcatatgtttgattttaacatctgtataaatgagcatagagctaagctttgattatgtggattaagcttgtaatagcaacgatgacactacactacttcataagggattcacatcagaaagatcatgatttcttacaatagtaaaacaaagaaaaatttcatgttgatgataatgaagaagaagaagaagaagaagaattaagaggaaggaaaagaaggaggagaagaagaagaacatattgcatatgagccgaccggtgatagagtgatggaagctttgcgggataacatcacaaataaatgtaataaaggtcttttaccttgttagatatgtttttttttccaatgacttagtttattattttaggttctgtttatttcattatttaacattttcgttcaaattatccatttacatgatttgaatgatgcatttgaatgatgtttgtagtgtttgtttgatcatttgatatttaatctaaatgatgcatttaaatgaatctttatttgtttgctcattttgtagttcatccacattctcatttagataaaaatgactaaaatacccatgctttcattttgacaaatgacaaataattttgcatttgcggttttagtaggtaaaacatgatattatggttttggcataaaaaatattttacggttttagcgagaaaacatgatattatggttttggcgggaaaacatgattttgcggttttggcgggaaaatatgattttgcggttttggcgtgaaaacatgattttgaagttttggcgggaaaacatgattttacggttttggcgggaaaaaatattttacgattttggcggaaaaaacataatattacggttttggcggaaaaacatgattttgaagttttggcgggaaaacatgattttgctgttttggcgggaaaacatgattttgcggttatgacgggaaaatatgattttgcggttttggtggaaaacatgattttacggttttagcgaaaaaatatgattttgcggtttactaggaaaattatgatttggcggttttggaggaaaacatgatttaacggtgttggcagaaaaatataattttacggtgttggtgggaaaatatatacaattttgacgtaaaataatagtccgtgatttccaatttttaatttttttggtgcaatatgtaatttaaaaaaaagatattaataaattttttatagaaattagtattattccaaaggttatatttgtcatttattctttttgactaaaccatctccatccaaatggtccaaccaagtccatccaaatgagttttaaaaatttgcctaaacttacaaagtcattgagatgaatcatccaagtgattcatccaaatggtatgttaaattgtcaaaaacaaacatcatttttcatctccatatagatgacccatcttgatggagaaaaaaacaaggatcaattataggattggcacataaaacatcatccctttgtaatattaggctttttagtatgctttactagattaggtacttcttctcttctacatagacaaaattaccctttcttctatatgttctctaaatcgattggatctagcaagacaattatccatcggttactgctgattctcttctattaaaattcaatccaaatcagatctatgtatagatgtatttatgttcctcgacgaagcatgcggttatccactatagcttctcttctgaatctgtccatgtaccttatcggtgaatcagttcaatcgacggttgcaatgattctgatcatctcacgataacaacataaaaaaatctttgtctcgacagttcttgatctctcgattatctgaaatgaatctgaatttctcaatcttaattaggatttcatcttctctcgatttatgaaattccaaattgatattgatcattgctttagattaaatcccttgggttttttatatactatccctatagggtttagtgttcttttataaaaagaatatttaattgaattttgggttcacaggaaagaagttttagtggtgtaagccgtcggaaaagatggcgtttgatggtgtaaaaccgcaggggtattttcgtcactccaagtcacaaaagtgccttgccccgtaagaccattgtaaaattgcctaatctcgagtttttttgatagaaagtgtcaattcttgtaaaagccccaagaaaacagagtcttagttaacgactttgtatttctttttttttatcacttggtgtactacttttagttaaatgatttagtttactatttttgtttcaattacgctcatgatttatcacaaaattttattattataactacatatttagctaaaaattagtactcaccaaaaaagactaaaaacaaattattactagctaaacaaaaaatgttatggatttgaatatatttaaattacattttttaaaaattttactagacccaaataaactgaacccaaccgaacccaaaccgaatctaaagttgaaccgaaatgctcacccatatcttaacgcaccatgcactcacaactgaaccacatttggttctttttagggtaatattaggaagtagccaaatttgacatcataataaagaaactaactatgtgtcggataattttggtaaatgactttttttgtggtgtggtagaggtgaaaaaaagactcatgttgaataattttctatatagaggaaaatttagaaatttccaacaaaattcagcaacaaacaaacaaattaaattgatttaaacttcaaaaataaatagattaggcaaaacccaaataaatctctaaactcatacaacgaaccaacaaaatttcaaatccaaaatctcaaaatctcaaacttttatcaaatttggaaattgtttaagcgttctttatattcttatcaaatcggtttaattattttgtttgggttcccatgtactatcctttagtgtatagatttttttaatattgggtgtttgtgataaaaaaaaatcaaaaaagaaattgagtttttctggtaatattaagaagagaaagaagcgatgaagaaagaaagaaagaaaaaggaaagaagaaggagattgaatgcaaaatggtcatttcgtctagcagaaaatgtctatctctataaactcagcaaaaaatgtctatctctataaactcagcaaaaagcgatttattcagagtttttttttttaacttaaatgaacccaaatctataaaaagcccctaaaatattacataaaattcagaaaaaaccatgaaaatttaagaagtgacatgaattaaataaaaataaggaaacaataattaggcatttgatcatggtcactgtgatattattacagagtcagtagtggtagagaatatccatacaggaaagagaagttgacgacatagatccggcgagggagagaatatggcaaaacagagatagagaaaaagaaaaacagagagaagacgagaaaaaaaaattatttcagtaattttatttgcctctccgataaagtattattacctatagtcatttactcaattcttttcggtttcatggttattttgtacatattcccttctttttactttttaatatttcacaccacttacttttgtctagagtaaaaagtaaaacttatgtatgaatgggtatgaatagaaggaaaaaaatgatccgctctttataacgtccaatacacaacatacattcaagacataaaaaatgagtttatgttgcaaaagtcaaagaaacacttgcgtatcaaatattatatggaacccatttgcatttattacttacagtaatatttgtctatttttgtgctatatatttgttcttccattcatttgtaaacccactcatagaaaaccaatgtaaaagttctttctattattactctttttcatgatatatgagttacgatacaaaattctattaaattaaaacatgttatcatcacgatcactctgccaccttgatttatattattattggagcgcgactctgccgcccctttattaatataatgcttttatatgtttgtttaacgtaccatcttatttgttgttttaacttgttaatatggatgattttaatcaccataatttacttagggggtgtattggaataaagatttgggggtgtttggtggaagttacatattttggagatttggttagatttgattaaataattggtgatttggttagataggttagagttgttatttaaaaaaaaaaaaatcataggtgatttggttagatttattagattgatttggttagattttacaacaacaaaatgaaagaaaatcaacgatcataattcttggactgggttaaactcaaaatgctcataacatacctttcacattccattttatgtgcctaataagactcatagaaacgttcatataatcttaataaagccaaaaaaatgaaattataattcaatcaaaaagcaaaagaaagctcttagaattataggtgacgttcagtcagatatgttggtaatcaacaccttcaaatctcaaatctcaacaagccaataaaaaaagaaaaaaaacaatctaaaaatatataacataaaatgtttattattatgattccatatttataacatatgtccacatgttttctgctattgttgctctccaattattagcaagtactctttgttgttcttgagtaccttgaccctcttcatacgcttatttttctcatcgccgctttcatcaatgccattttcttcgagaacatctttcttaggaaaaacacatccgaacgacattccttacgaagataattatgtaaaacaacacatgcaaatattaactctgcttgtgtcttatatggaaagggaggtgcatatttgaagataagaaatcttaatttgaagattccaaaaatcctctctattacgtttcgcaagctagaatgccgatggttgaacaactcattttgattgttgggatcttttccttgtcctctaaagtcttggagatgataccgagtacttcgaaatagagcaaaacaattacgacaattggcgaatccacagtcaactaaataaaaaaatttctgtaatttaaagcacaaaatataagtaggataaaatacaaattaataacaaaaaaaaactattttgtcatattctaaacaagataccttcagaaacttttaatttatttgtgtttcttgtttaggcatcatctaatacctttgagtcttgagctgaaccttcccatccacttagaacatatataaattctaaatcaaaattgcatgcaacaaaacattttgtgataattgtccttttcgattacggtaactagctgtttcttttcctgttatcattgcagggatatgtgttccatcaatagcgcccacacaatcctaagaaaataacaaacttaatggttaaaatttacaatacttaaaagaaataaacacaaaaaaaataaccacgtaccttaaaataaggataaaatcttgtgttgtcttttattttcgtgggcactacaagtgtaggtttagccatatagcttggtgcaaatacatttaacaccttcaaaattgtattaaagctcgtacttattgagaatctcgacctcttgaatctatcttgagcctggatatacctcaaattttgcccaatgatgaacaaaaaggaagcaagcatttcttcaactgaaacattcattgtatctcttaaacccatcttcacttaaaatatactgcataatttcaggaattcttctggatacatgcgatacaaatgtcgaaaatgatcgcgatcttcaacaaacatattttgtatgtattcatgcccaagtctagtagttggaaacttgtgaagcaaaatatcggattttcgcaaggatagacaaaaccagtaataaaaccaaaattttttgaaaatcacagtttcaatacaccccccttattgtttctatggataatttttatcaccatatttcatttaatactctacttcacagttttaacatggatgattttaatcaccatattttatttaatattttattcaccatagttttactaatgttgagatacatttggagtcccttgggataacggagactataaaggagaataattcttcgacggcccaagaaaagacaaaatcggtgatcttccttataagacaaatggatgaaagtgtcatatatgactatgcacacatgagagatc

SEQ ID NO: 484 - DNA, 82360 bp, Arabidopsis thaliana
gatctctctttttctcaacttagattttagattagaaattttaacagattcttgatgataaagagcaattcaaatcccaagaaaacagcaaaatatcaaattttggaagattccatttcttcgattaatgacgaccttccctttttataaattcaataaaaaaaagtttaataaagaaataaaaaaaaatcccacaaaatttcaacatttaccgaaaaaatctccgacaaatctcgaacgaacactcaaaaagaaattaagagcccaaagagaatttagatggaaaaagagaagagaaaaatcaatcaaacaaaaagctgttttgtctaatttgcggaagccaaaataccgaaagtacccttgtttggtgcattaacgacacgtggaatcatggaagactctgacccaaggactttgagcacccacgtggttttcatcgagaaaacaaagacaagatcgtacacgtgtcttatgttcagtggttattacgttgtaaggtgggatgttgcagcgtcaggtcgtcacgtgtctttgtttttgttttttaatttaaatcacattatcttttttgtgctaccacgtgttccgcttatcttctctttttttctcttggtaattgacacgtggagatttgttaggttatgtaacctgcctgtcgctttagtagtttcatttcgctttggtaggagatttagttttctatgatagtaaacgcaacttgtcgaactttaaatgtatttaaattgaaaagtatgcaaaacgaatatttgacatttaagtgtatttttcaatgatttaattgtcaacaattaagtgattagaataagatttctattttgttagtgcgatggttggttaatatttttatttgtatagaataaacatgagtaaagacaattaattttctttttcaatgtaatgaccatgttagcaatactttgaccgtgggtttcaatatcttagatcatagtgttttaacaataaaattttatgaaacatttgtaacttgtaaaaaaatagagtcgtaaggttaaaaatactttttaataattttttataatactaattagtaccacttttaaattagtcatataccatacaaaataaaataaaatcgctgacataaattttttgtatatttttgaaaaataaacaaagaaattaaattatacgtgtttctaaattgttactaactatcataattgctttttaaaaactatcataaacttaaaacttctgcagtcatatttataaatataaatatctaaaaattttatatacgtttatagaagagtggtttgcgttatagtttttacaaattaaataaaatcatatatcagcttagataataattatctttaaaattattagttacatcaaattttagtttatgaattttttttgttttaagtttatttttttaaaaagttattcttaaattttaatgaggctattttagtatttttatatattaaaaattaattgtttaaaaaggaagaaagaatagggtatttttcaaatgaaaactcaaaaatagggcatttttccaaatttactctttataaaaagtggttaaagtttaaattttagaattaatgaaattatatgttgttatgagtttataaaaaagggcatatgattcagattttacaattaattcttaatttatttattttatttgtttgtctaacttttaatttatattaaattattatatgccatggcataatgattggttaaaactaaaggaagtgaatataagagttcatgaaataaatagcaaatagagcaaaatatttttgataatttatccacaagattattattattattattattattgtaagtaaattgttttatgatatgtctttccaaattggtaacaattatccaaatttaaaagtttctggtcatcatatttataaatgcatatatccattgcagttcagaaaaagaagatatctatacagacaaccaaatatctaaatatctaaaatttaaattatttggaactaatatcataggaagtcaaatagttttggatatttttttataacaagtttttataaagtattaatatatctagtagcaatcatattttcaatatttttttgtcacactctaattctttgctagctttatccgtctatttgttaataaaatttacatgtttagacaatgtctctttttctcgggttagaaatatatattttataagtgttagttcaaactttgatttttttttataatttctggtaaatctctgaacctatggaaaggttcatgattaattcctagagagagggtatcctatatcctatatatttgatatcttccgggtttttaaatagatcttaagtagcatgtctatacttatagtcaaaaaaataaaagtaagcaattctacatatggagagaatcgatccctgacttaaacaaacaggaccacttccaccagactagaaccactagcccaccacctttcgttgggtcgtcagactttgagtgcttaggctatcgatgaccgtcccaaaaaaaatatggtaaatataaaagatctacagagctagatatccgcattttttaggatttcgaatgaagacgatgcagtcattctcatatagattctcttagaaaaattacacttttatagttttttttttcttttttcttggacttttcactacttattttttacttttgtatgttttttgaaaggtcggactcttcaatcattctctaaattattccgagttgaagaaaaagttaagcatcaaaatatacaagtaataattctaactttttttatatttaaaagtcagtttgaataaagacattgtttgctaatagcttataatgaaatgccatggaaaactagtagaaaatcaatatcacataacatttgtatatttgatctgatttagatgtcagaacaataaaatcactaatgttgtaatgattttatgaacaatttcaaccacaaaatcgtcactaattcgtatttggttgaatttacatcaaactagcgaatgatgacatcttaggaccaatccatctctccgttcaaactcataaaaacgcaaatattgcaacatgtataaatgcagataaatagaccaaaataattaaattgaataaattcaatgaaaggaagacaaagcatgtgaaagatacgtatgaaaattgacaacaacaaaaagaaaaataatttacgaaagaagagaatctgcagagaaagaaacacgcaagaaatcagacaagagatcagatggtggacctcacagagatttaactctttttaaccccaaactttattgtttcggtctatcgacgtcattcctgtgggtgtttgacacgttgacattgtttcacaacagataagcaaaacaatcaaccaaattagaaagtgtagaggaaaaaaacgattttttattcagataaagaaaatgagtgtttataatgggtattgaactaatcaattatgatatcatttgaattgtaatctttttgttacgtgtaatttaatatttgcgtcttagtatttaaacaagttataccagttttatattactaataaattagtttttagttttactacattaaatttgtgtcacattaatatttgatttgtttcactttatttccttcttgttgggctgtttatggtttcttttaatttcattaagttgggctgtacccactaaagttaaccaatctggtaaatgaatacaaatttgaatcaaaagagaaactcaaaaggagtaaaggacccctttgctatgacatgtgctggtacattgattcacttaacatgaatcaatcaatgtgtttaaactttgacgcccaaaacatgatatcgttgtgtaagctgtttaagtcttttaacattaaaaccaataagaaagttttttatgtccacttgtgacccgttaggtatatgttaacaaaaatttggcagttccccttgaaaatcactaattagtatgacaagaatttgatactttgtatagaagtttcgatatgcaatattttgttccaatctaacaattacatcttttatacgtaaggtatcattatctcggcgatcaatccaatctgtagagaaaattaagaataataatatcttgtaacagaaacaaacacaaaaatttgataactgagttcacggctaaccgctacgtctcggggaaggactcttgcttccaagcttaactatatcaaagaggttacacacactactaacttgtgatgtccttggttctttttcagattttaaacacaagaagaacaagattcaagaacaacaaagaggaagaagaaagcttgctttggaagctttttatctctcttctctagaactctctttagcttgtcttgtcacacaactaccacaacttctctttgtaagttgtaataaagatattatatatgtgatatgtaatgtaccacttttgttcttctttctcttcatgccattttcgtcaggcccacaaaggcccaaatgatgtgtttagtcaaacccaaataacaatctccaccttttgaccaaactcaattctgacacttgagtacttctcacaaaaataactcagcttgattgtcctattttatgagactattgaagttaccagggccgctgctctgctctacttcagtggatgttgggaagctcacaacaatgctggaacttcataccaggtactacatccctcttaagaattttcggtcatttacttgtgtgagccttagatacactgatataattcatctgctctaactcactgtccagttgtgaaaagcccttagctagcaccctagacttatacctttgcttttcaacaacttctaaacaagttttatgataacccatatcaagtgtacacaagaagatccaagccgcacgtgtgaagagaagaaaacaagaagaagacacgtgcgaataaacatttgtatataaactttgtagctttcagaagaagttttcatgttttgttttgttgtgcatttgaattatgtgtcatttgtgagagatagagtgatgatctagagatgttctagagctcttctctgaaacaatttatatcgattatttgtttgttaataaagattacatcttgtttctatcaattggtgcgttcgtgatcgagatcgaagtatcgctggaaaaagttagggtttgagtgatgtggggtttttgagagatcgaagaaatttttcaatcaaagatggtgacgacaccagaattaccgtcgattacggagatattagaggcagagcaaacgacggcgtcgttaactgaagttcacgaacaattgacggacatgagtaacaagattcgaagatctgattcaagaccagattcaaagttggagtctgtacgagtcaaattgagtgctcaaattgcacgtcatgaccaacaattgttggatatcgggaagaagattaacaatgtgcttcgcgctttgcctagagtagcgtcggcgccagagactggagggtctagtcatggtggagttacaagatcgcaagatcgacataatcatctctgtcccggaaccatacaatagtgacattaggccaggaattagagaaaacctactcaagaacgtggagatggctgtgtttgaaggagttgggatttactcttggatcgctagggtggagcgattctttcgtactgatggctataatgatgcagagaaattggcactggtattcaatgtaaatcactctctagtggatttacattgaataccaaaagaattgaagtggagctgtgtaatcagcaattgttacaactgggagaacaactgttacctagagaactgcgggaagttttgcgagaatatgagcaggtgtttgagattccttcaggattaccaccactgagaggaagaaaatactcaattattatctcaccagggaataatgcaattagtgtcaggccttataaatatcctcatgcacaaaaagagataatggagacagtggtacaagagatgttggattctggtattatcagactaagtcagagtcccttttctagtccagtgttattagttaagaagaaggataaaagctggcgtttttgtgttgattacaaggcattgaaccgtgtaactgtgcctgaaaagtttcccatacctatgatagaccagttattggatgaattaagaagagttgtggtgttctcgaagttggatgtaagagtgggttatcatcagatacgaatgagagcagaggatgtggcaaagactgcttttcatactcatgatgtgcactatgaatttttagtgatgccttttgggttaacaaacgctccagcaacatttcaagcttctatgaatgacttgtttcgaccatatctcaggaaattcgtccttgtattctttgatgatatcttagtgtatcgtaaatcgatggaggagcagggagcatttgacaatagtgatgcggttattgtcagagcatcaattttttgcaaatggaaagaagtgttcatttggagaggataacgtggattatcttgagcacattatttccaatgaaggagtgtctacagatccagctaagacacaggcaatgactcaatggttaacaccaaagtcagtaaaggagctgcgtggattttaaggcctcacgggtattacggaaggtttataaaaggttatggagtgttggcaagacctttgatagatttattgtggaaagacagttttgattggagtgttgaggctcaagtagcattcgataatttgaagacagccatgtctacagctcctgtcttagcattgcctgattttaatgaagtgtttacagtggaagcagatgcatcgggttttggggtgggagcagttctgatgcagaccaaaagacccatcacttattttagtcatggattgacggctaaagaacaattaaaacctgtgtatgaaatagaattgatggcaatagttttgtctattcagaagtggaagcattacttgtttggtcgtcattttgtggtgcatactgaccagaagagcttgaagtttctattagaacagaggggtggttgattaaattgttgaattacgatttcgatatcttgtacaacccaggtgtggagaacaaggcagcagatgggttgtctcgaatggagcgaccagaaggttctttatcgtctcttgttctaatggcactaacagttcccacatcgttacagattttggacatatatgaggagattgagaaagatgagcagttataggaaatgattcaagcttgcattaatgaaccatctaaacatcaaggctatacagtgagaaatgagaagctatggtttaaaaacaggttagtaatacctaagcagtccaagtctgttcccatgatattagaagaattccacagtggcttgttgggtggacattcagatgtgttaaagataatgaagacattcagatgatacaacaatcgtttcagtgggatggtatgttgaaagatattcagaagtttgtctctgagtgtaatgtctgtcaaagacacaagtactccacattatcacatgcatggttattacaacctcttccattacctcagcaagtgtgggaagatatctcaatggattttgtagaaggacttcctactttgcaaggaaaaaatgtgattttggtgattgttgacaggttgagtaaatatagtcattttctgagtttgaagcatgctttttgtgctcctgaagttgcgaagttattcgttaaggaagtggtgaaattgcatggttttccagcatcaattgtgtcagacaggggtagcacattttttagtgctttctggaaagactgcttcaagttgtcgggaacttaactcaaatacaacactgcttttcacccacagacagatggccaaacagaggtgcttaaccgttgccttgagacgtatttgcggtgtttcgcttcaacacacccaaagacgtggcatcagtacttatcatgggcggagttatggtacaattcctcatatcatacatccttgaaaactactcctttaaaagttctatatggtcgtgatcctcctgccatattgcgttttgaagagcagtctactaagatctccgagttggaagagatgcttaaggaaagagataggatgttaggatagattaaagatcatcttattcatgctcaacagttgatgaagaataatgcatataaggaggtgatcattgagcctgagacagtgttagatactcgttataacacagatggtgtgttggaagctttggtgcattggaagggtctgcctagctatgatgactcttgggaaaatttcagggcattacaaaattagtatccttcattggcgcttgaggacaagcttcgttttgaagagggggggggggtattgataagccatatcaagtctacacaagaagatccaagccgcacgtgtgaagagaagagaacaagaagaagacacgtgcgaataaacatttgtatataaactttgtagctttcagaagaagttttcatgttttgttttgttgtgcatttgacgtatgtgtcatctgtgagagataaagtgatgatctagagatgttctagagcacttctctcaaacaatttgtatcgattctttgtttgttaataaagattacatcttgtttctatcaatttactcccagctagcttctgttttttcattctagagtccatgtcatcatcaatagcattcttctgatgtttccctttcttgcttttcatccgttcctcataggttatcaaagcacatgccacagaactcgaatcttcacatttaattgctgctgaactttttgattcttttgatggagatgaatctgtatcttgacttaatgaactctgtctctcaaaactatctgaagtggaaccttgaaacagattctcattagatgtcaccttctttgacttcctctttcttgattgctattcacacttggcaataccctcttcattagtttaagcccgtgacacattcacttcactcttagcaactgtcccttgaagataataaagccctcgatgatactttcatgatatcaccttcttcttatccttgtagaagtgaaccatgaaatcacttccctcgtacttgcaacctgatttttctagcaacccataagaaatcagattcctacccacatcgggcatttattttacatccttaagtatcacaaccgaaccatctcgattctgaatcttgattttcccacttcctttaatttctccatgagtgttgttagccattagcactctaccaccattgaatttcttgaagtcaaacaagacacatctatcagatgtactatggaatgtacaatcagagttcagaacccattctttgcatgtgctttgagtgctcacagttaacaccaaaggttgcggaggcttagttgcaatattagccaaatatgcaggtttctttgagggcattcccttttctagtgatcttcctttctacagaaaaaaaaacatgtgttgttacttggccttgattggaatttcccatttccatttgaacttcctgtccatggccttttatttcccttattgtttgatttgcccttaagatcacccaataatacttctgaatctggttttgacacgttcaacaatcccttttctttcaactcaatttctttagagtatgctgaacttatgactgcgtttagtgtcaaggtatccttcccactcccatacttgagtgtatcaactagtgaatcatattgtggtggtaagccagccatgagttgtagagcctggtcttcatcactaatgttgatgtctaaacttgctagatctgcaactagcttgagaaatgtatccagattttcttcaatgcttttgttctccaccatcttgaagcttgtgaacttgtgtttcaaatagatcatgttgggtaaggtctttgtctggtagtctctttccagtgccttccaaatcccaagtgcagtagtctccttcataaccttcattagaattagatcgcttagactcatgctgattagactcttagctcttttatctttctctgctttctttggatctaccctaggttcacatccttcctctgacttcccgggtcagatggtgtagcatcttcaaccaagacagattctaggcaactgacaaaacatcttatgcttccacacttaaagtctcctttgccatcaaacttctcaatctcaaatcttgcatttgttggttccatagctagatgtcttccttacaatcaaacctggattgctctgataccacttgtagagaaaactgagaataataatagcttgtaaaagaaacaaacacaagaatttgataaccgagttcacggctaaccgatacgtctcggggaaggactcttgcttccaagcttcactatatcaaagaggttacacacaccactaacttgtgatgtccttggttctttttcagattttacacccaaaaagaacaagatgcaaaaataacaaagagaaagaaaaaagcttgctttggaagctctttatctctcttctctagaactctctttagcttgtcttgtcacacaactaccaccacttctctttgtacgttctaatagaaatattatataggtgatatgtaatggaccacttttgttcttctttctcttcatgccattttcgtcaggcccactaaaacccaaataaggtgtagtcaaactcaaataacacaatcgttccccttttagttctctttgaaagcaacaacctatgttgaggattaaagcttatgtataacgttatactcgtttggatcattcacacctacattacgtttcattggtactacgtgcttcaaaaaattgtaccaagtcactctccacttaacaaaaactacttccaaaaggtggaaacttacgatatctctctagcttcctacctaagtttgataagggctctaagcctctaacaaaaacataaatctcatcagacaacatcatctaaccttaaaggagctcccacgtccaacgcttttgccttcaagtccttcatctcttcctcgatttctcgcattcgagtctcataactttcttctttctccttcttttctaacacttcattcagtttcttctccaaccaatccaacttaaatccagcctctttcatggatcttagtaaaccacatgcaccatccagatcattcttagagatttctctaggcgactggcgcaaagtctcaatcaaactgagtagaacattcatatacgctgtcttcacaatccggttcgttggacgaaactcctttgcaacatctggatgtttttcaaaaatacgcttcacaaattccacctgcaagtaaaacaaaacaaaatccacaaaactcaataaacaatacaatagagtcttgaaatttcaaaaaagaagtttgcatatttatttacctgtgaaggaagaacatgaaacccattaacaacaatgctttccattattactggaacctccctaatcaaatctttagacacttcaccatcattgtttagctttgtctttttaaaaggcgggtttgattctttagataacactaatttgtcaataatttcaagaaactcaacaacaatcttgatttctccatttacaataaatccagcaaagtgttcatcaaatttcccaatagaaaacatagtttcgctactgaaaaccgaactcttttgatcaaacatggtttctgtaagaaacaaaaaaaaacacaaaagacatagctcaaaactcgtaaaaatctcaactttaaaaagataagagaaaatgtagaagcaaaaaaacaaacctatacgttgagagagaatttcagaaatttgattgactagagtaaagataattttagcgtatctactccacccacaacccattttttgagcagaatcttcggcaacaatcagagttagagataaagattctttaaagttattttctttggaatgtgccacaacacgcctacaagcaaaaaaaaaacaatggatgcttcacatgaatcactagacaacatcacaacagaacaagttgtgttgttgtttcttaccagctgcagccaccgatgacaaaataattcgaaaaaagcatatctgaattcaacgttgggacattcttaatcacccaagtgaacttgttatcgtctagatttcccattgaagaacggtggagagaactaaaaccctagaacccaaattctcaaagtcaaaccttccttctcgtttgtcccagaaaaagaaacccttagttctctggttctctgtattgcggcccaatgtactacttggcccattttactattttagcccaatttctgtttccttgctactacggcctccgagaactaatcattcggtttaatcggttttgttcgatttttcgggttttcaaatattctgacgaattgaaccaaaatttagtttttgtttcggttcaggtcggttctcgttttctttggttcggattaggggtggcaaaatgggtttgaaccctaatgagttgaaaattttgactcaaatgagttgatggatcaaataagttattgggtcaattggtttgatgaataaaatgagttggattgtaatggttaatggtttcaatagtttacccaattaacccatcaagttttgtaaaattgaattaaaccaactaaaatctctaaaccaatatcaatttaagtttaaccaacacatctaaaccaatttaataaaatcaatattttttcatatttcttaaatatacaagcaatgaaattgagaagaagtaaagtcgtaatttttccacaaaaaacataaacccacaatttttccgccaaaaaagtaaacccgtgattttcccgccaaaaacataaacaccgtaattttcccaccaaaaacaaaaactcgtgattttctcaccaaaatcgtaaacccataattttcgcgctaaaaacgtaaaccctaatttttccgccaaaaacgtaaacccatgattttcctgcaaaaaacgtaaacccgtaattttcccgtcgaaaaaacgtaaacccgtgatttttttgccaaaaacgtaaacccgtgatttttccgtcaaaaacgtaaacctatgatttttctgccaaaaatgtaaacccgtaatttttccgccaaaaacgtaaacccatgatttttccgccaaaaacgtaaatccgtaatttttccgccaaaaacttaaacccttaaaaaaaagtagaatccgtaaatattataagtttgataataatgaattaataattattaataatgataattatttattattgtttatattaataattaattaagttattaattaaatgggttaacccatttaacaactcaacccatcaaataaaatgggttgggtcaacccataactcatttaaccctaaactcatttgattatgagttgagttgagttgggttacccattttgacacctctagttcggatataaactaaacaattgtgttctgaattgaaccgattgttttcgggttaactgaacattatttacatagaatagctaaacccaaaaaaattaaaatttcacgacaatatacaagcccattaatatattaatgattcgcctaaataggctgttgtaagatataaaattaagttttaatctgtagtatttgaatacggaaaaaatcaatagtatttgaattttgaattttgaatattaaaatagtaatctacaaatttaattttacaatacagtttcaattttaattttatacttcatcttaagcaataacaatttgaaatcaaaataatatttatattagatcaaatctacatctttaatattaaaaataattaataattgataaataataaatatttttataacaaaaaaaacagaaaccaagaaaatatttaaaaaacaaacattgtttaaaatatatttttaatataacataatctccttaattaattttacttcatatatacaaactctaaataaattaaaattaataaataaaaataaattttcttttagcttcctagttttgaataagactctaattagaaagccttattagtgtcaaacagtcaaaagcacaaactaatgtcatctagaaacaacgtctaatgttggaacttggaggagctcccacgtccaacacttttggattcaagtctcataaaatattaactttccgttgtcgtcttagaatatctttaatgtggaactttatttttttctctattttatagttaactatattttaaagaaatgttgttctactgtatgtctataaaataaaggtttttctataatagagaaaaatatagagtaatcttttttttactctatgtatatagagcaatttctatttttttctctattttagaaatcacttattttgaaaccatgcaatagagcaaaatcaacaaatatttcatgtaaaatagaatcatgtctaaaatagagaaaaaataaaattagacattagaaatattctcataaaatagaaaataatcatctcgtcattgaaatgatttttcagaaagttgattcactagaggaaaagaaagtcgagcgtgtcttcccaaccagaataattttacaacaataatcaaccggcagaaacaaagacaaatagtcattaaatttgtttacttttgaacatgcaagcaaaacaatagaacctaatacctaaattggactaaaaacatatgaaaaacaagtttgtgttaattttgatatgaatttttttgtaattaattttactattttataaattagataagtgtaaaatagttattttgtaaactcactaatgctaactttagtaatttgtagtgtataatataattatttattgttattctaaacaaggccgactcaaaaataatttggaccttgtgccctatttttttttagaaaactaaaaattatttttaatttaaaaatttagtatctccatacaaaaaaatatgtttttcatacatattattcttttcttttgtcccaaatatagataaaataaacgatcaatcatgatttcggtttttgtcttctccagtttattagtcgtcaactacatcctccatgagagattgccatgtcactctccgattctatctctcttcttcatgtcctcacgcttcagctcaccattcttgctaatagtaatgaattaaagatgatgtggaattaaaaacaacacataaaactagaaccaaaacgttctcatttttattccaacccgatggagaataatgaaccaaaacgttccacatcatctttcttcaaacaaacaccaacctcaacaccaccacttccatctccactctccgacaatgaaaccgaagcatccttatcaatcgtcacaatctctaccttgaccggttttccccacccaaaatcagacccgtaaatccctaaccgggtcgacccagcaaccgatatcatttgccttcccggttccatcctcttaaacgcttcaaacggtaaaagcatattcttctctatattctccggacacaatccgttgacccatccggtcaaagtctccaccgccgtgatgaaaccttttccttctccttcttccaatattggttctgctttcacgtcgaaatctcccgacccgacaatgcagttcccgaagaacgtcggcggtaacggagggtttaaccgtgaccgaaagtctgatgcaaaaccaacgcacacaaaccgggtcgggtcacctccacgcatcttcaccatgcatgttataacgtaagcgtaagtaatgacaaaagtcgacaaacggagctgcttagcgtgtgactcggtctccactcgttcacgtagcttcttgatgtcttctcgagttaaccggtacgtgactcggagaatatcggatccaattattttggaaggaaacagttttaagcttggtttgttgttggaagctgatatccaccggttcaagagttttgtctcgagtcccgttgggtcttgaacaatgatacgatctaaagacggtactagatcgtgtggcagagcttcttgttcttgtttacagttgtgagcccatgctttgagaaacatggctgttgttttaccatctaaaacggcatgatgtgcggttacgccgagagaaaatccttggtttgggaaaaacgttacctgaacggcgagaacgcgagctgattcgtcggaaaccggtaactcagggactaaagaatgaaactccgtggcgggacgaggttcatctccggaaagatgggaaaggtcaccgttagactcagctaccgtgagatacacggcatctttgtcgtcaggagaatagacaatggatggtttggttttgattgaatcccacacgaggcggccggcgagtgggagatagtggaggagcgtggctgagagagaggacttaagtttagagatgagagaagagcgagtcagctcggggacgtggtagaaaagaactcggtcaacggggtgaagtttgagccaacccaagtcaaagtaagtgagtgggagtgtgagcgagttagaagacggcgggctaacttggaccacctcaagtatgttaacggctgagttgaaattcaccattactgaatttcaaagttttattgttttgactttggctttgagcgttagactatgtatacttctataggatagatattagcttcttttggaggttatgggtccttacttacttctctcccaagaatatcaaccacctgctaggtttacccaaccggtgggtgtatatttatatatgctattttttattttattttaaataagctttatgtttgagttttttcttttccaaatttataaacaaggttatggactaaaaaaggaggcgaatttctagttcaagttcatgtaatttatattttctggtaactattaaacagtttacgaatttgttttaatttttatttttaagtttacagaaattttgttgatatcattagaaataaatatcttacgatataaatcaacagtaacactctactctcatattgttgggctaattttttgaaattataatgcagctcatttaaaacccaaacaaaaaaaaccacaaattaataagggtgagttaaatatatatacatagaaaactaaataattaagtatctatccatagaaatcagatatttagttgttttttgtcaccagaaaataataagacgaaattgcccctatgaccaaataagatctacatgaacatattagtcatcgttagaataaaagtggttttattaagtgacctgataaaagaaacataaactagctttggttaaaaacatttatctacataagaatatcactagtctaataaattttcatatatagataatgataacaaggaacataaattatgagggtggttgctaacatttttattatccttgattatggtaagaacattgttatcacaattaattttttagatcatcacgaaatcctccagagtagagtaaaaggaaaagaatgtaagatatatgattatacggatagatgacatttatagttaacggtaaaagtagtgataatatgttttaccatgataacaatagtcttagttggataatataataagacaatttatgtgatctgtcagcataaacatttataatgagaatatttgctaacatttgcattatcgattacaatggtgacaaaactgttattacgataattggtgtcttatgttttcatgaaaccctcaacagtaaagtgaaacgagaagagtttaagtatatattaatgtggatgggtaacggtaagggtaaacggtaaaagtggggataatatgtttatcaagataactgtgtgcttacctagataatatagttacacttacaatatgtagaaatattaatcgtccaaacacatcgtgaaaatgagggaagctaacgttttgattatcgataataatggtgagaacattgttatcaggttaatgtggatttagttcttcacaaaaccatgtagaaaataggtaaaacatttattatgaatgataaaaagtggtgataatatgattaccatgataaatgtggtcttagttggataaacaattagacgattggttttctagaaagagaaaaaggtatttgaatctccaagaaaaaaaaaatcaaaactaagattttgttatatggctgacataatatctatctaaaactacaaataatacagatatagggatatatacgtcttttccacatgaacaaaattgctgtaacagtgcagtatcttgtcaattaatttctcattcttctgagtatagatcttcataatacccaattaaaaaaagatttggacgtgtgtatacgaagaattatagatgtataatctttgccactacatccactgccgcaacagctgcttttttaatagttatgatagcagctgcagtctccacatacatagagtttgcgttcactttttttttctgtcacaacaacaaatttagtctgtttgctttctttttttatatttttggttgtgacattgaagccatcaaaaccgcctttcttcaaaacaatatggagtataaaggcagatatgattccaaactctagcaaacacaaaccttgcattacctggtaaacatataacattgacatttatttggcaatgttattggacaagtaacgtttgtgcaaagaacaaaccttgctatggaatttcaagagaacatgataagtaaatgttgttaaattataagcacatctaaaacaaactaataaaaaaccttctaaaatcctataattatgcctttacagttaggtgtgttattgtccacttagaactattgggcgaaactggatcaactttccactctcaaataatctcagaataggccaataaaaatgtcatgttagtaacaacgattaatccaaaaatttatagaggtaagtcattttttttttttggcaaactcttagaggtaagtcatttatcataagaaaataaaatataaactcaaccaaatatttcccatcatcctcacgtatagacaaataaaagttcacatgaaattaaaaagataacctatacttgaactctaaggctgccaaaaggttatattttgactcaaaaattgacgccattcaaaattttacgaaaaagtaagctttaataattaatccaaaagtaacacatttggttctgtaatcaattccctaagccaaactatatagagcgatattttctttcttaatgatccatatatgatggggaaagaagaaggagaatcatatatccatgtagaaaccatggtaggaatttaaataaaagaactggtttccatcgttgaacttcacatgacttcatatccaaagctaacaaacatgtatataaaataatacactaattaaatttatcatcacataaagacgaaagaatcatctaaaaatgatacatttatattggggtcggattccctcacaagtaagaccgaaccaaacagtcataagaataacaatcacctcatgattaaatatatgatagactccgaggctagaacaaagcatctcgggaccttattcggtcaaccgtctcaaagagttcataaattggctcgggtggtaaccctttgaacacagccggagccgaccgcgagaacactacggaaaatatctatatcgctttgggggacaatcaactgagctcaatagacatctgtcaagcgtgccccgagccggtacatactgtttgccccgaaactagctctcaaacgaccaccgagccttgaagaacacctgaggcaaagacttgtaaaaaccattcattctcaaaggatcattttccggaaaaaataggatcatttctcggactttcggaaatgataaaggagaatctctgaagataatgtcgaatcaggaaatctttccgaagcctccaaaaattaaggaaaatatacttaggaagattatcctcctgaaccgacttaaggataaatgaaaatcttccgagaatatcgctagagaggcggtttaacgaccctatataaagtgcctcagggacttcacaaaagggatatctttggatattcacaagaaagacacaattttatacccaaagagaactacgaatggcttgatcccttcatagggtacataggcaatccatcacggatgcagctataccttctaaaaaccctaattccttctctgtacttgagcaaaaccctaatgtatttcataagagattagaacctcttttgtaatcgagtcttggatggaatacctatttaagagaaattactagatttgttttccctctctaaacaaatttattgtgtgaatccttggttcaacaattggcgccgcctgtggggacaaaaaagaactctcttcgcatatcattcatccaagttttcgatgtacgctcatcaagccaagacaatcagatccgtctacttgtggggcgatctcccgtcaaggttcaatgaaccaggtgacgtataacctgttcacggattgccccggagatcagatttccagagaatctaaccgtagctcaatcggatatctcttctcaaagttatctccggttttctgaagttgatgctgtctgtttctgacaaatgatctcataactccctttctgcaaacaacaaatctctcaactcctcttattatctttatatccctttctcttttaatgagatgtgtatagaccaatttacccctcctccttctttctctaatattcattataaaattaaataattttagaaaaacaaaaaaaaattgaaccgaaaaaaaaacagaatccccaaaactctctctcctctcctctgaagctcgagctcactctctctctcgctcactcatcgctctcttgccggaattcgctcaccattgttgccatatccttatcttcggcgagcttcgtcgacataaaaagaaaaggtatgtttctcgagctgaataaagcttaaaattgaagattagaactaagagattttgtcaatttgatttaagattaaacaaattgtgtttgggtatgcacattggaagtttatgcataccgcctgggttgaatagatctgtaaatgggtaaaaaatggattacccatagtgaattgtagttttgaacccgaaaccattcaatttgagctcttgtccggaaatacatctggtagaactgagtataactgcacatgattcaattgaaaaatatatatttagtatgacttagttgcactagtattaaccatttacatgtagtatttatttggtacagttgtattaccaattttcatgtagtattattagttatacctatattatacaaataggtgtagtatgattagttatacttgtgttatccagaattgtagtataactagtatatctgacagagtttttgtattgttgtcataggatacaatgatggaaaatgtcatcatatattttagatggaaagatcgagcgtacaacttgatgatgaatacaccaggagggaaaataactctctccatgttagaaagtaggatttgctgaagcttggattagatgaaagtaaggttaaagtgcaaatgaagtacaatgcagtgatgttgggaccaactcaagatcatacacattagtgatgatgaggatgtcagtgtctatatatcttcaggtgaaatggttaatagatattctttgactgttgacgtcatcactccaccggaattgcccaggaactgtctagagtggaggtcgtcaataaaagttctattggtaagaactatgctgatttgggttcaaatgaggatgaaatgagagattatgcaaccatcgtgatgggcgaattggagggacaaggaacagaacaaaatgaggtaatagtggaggttgatgatactcaagatcctgagattggatcacgtgatgatagggatgatgatgataggggtgatgaatacgttgaaccaccgcctgctgtagaatctagtcagtttaagaaagaatgggaagacagtatcagtttgactttgcgagaagaatttccaagcagggcagcattgcacgaagtggtggacaaaggtgcatttgctaacagttttggttatgttattaaaaagtctgataaagagcggtatgtcctaacgtgttcaaaagtaaattatgactggcgtatatgagcttcatgtattcaagatacaagtatttactctattagaaggtacaacaagatgcatacttgtacccggattagtaagagtaatacaaggatgaggaagaggaaaggtacccctgaattagtagcagctcttcttcatgatacttttcctggactgttggaaactccagctcctaaggttatcatgaagcttgttcaaacaaaattaggtgtgaagatatcatactccaccgcattgagaggggaaaggcaagccgtttgtgatttaaaaggtagcgcggaagatagctacaaggatatcaattgttatttgtacatgttgaagaaggtaaatgaaggtacagtaacatatctgaagttggatgagagcgggaaattccaatacctattcatagctttgggagctagcattgaaggctttcaagcgatgaggaaagtgataattctggatgcaacacatttgaagaaagtatccatgtattcacgcgttagccgctttcattgcattcgagagcgatacaacaagaactcgaggtatgaaattacatgaattggtttcaaaatattattgggcggaattgtgggcattggcgtattataggactatttatttagtcccggatagatcacagtgggatatcccggatgacatcaaagcgttgaaggtattacctctgcctcggaaaaagaagaagggtagaacaaaagtacttaggtttccatccaccggagaaagacgtccaaaacgtcaaaggactcagaacaaaaggaggctgagacagtcgttgcaatggttgttatttggcacccatagtatttgattttaatcattgtaaaccttattcgcgttgtgcaactatgtaacactagaatttctttcagttaatactaaattttaattcactgggaatactgtgagaccccgtcccggacgtctcggcgtccggcaaccttggactcacgttcgcgcctcttcccgaccaaacctcttaatttttttgcgattcaatatagaattgcctttacgaggccttattctataatcgctctcttattacacagcggaagtctttctaaccttggtttagttctaactaactcttgtaccggtttcatcgtctttatcccttagacttagatcgatcctttactcggtcaagacatgcatattgttcgctaaccattctaggcctaacaatcgcatattcctttatcctattttcacggtcaattcccaaacgtctaccttaactaataagttagatcgttacataccttggccaacatgcggatgtgattccttagatcgtttgtcgccttattccattcgttccacgattcagatccgatcgtgtattgatggaccaatctctatcgttacttagccatacaaccaaccaaccctactggtctaagtacaaagataaaagattggggatcgtacgattcccttggttcacgatggcccaatcaagctattggctcattggtccatccgttctccaaacatacgtccctccggctacatggtcaacgattgagccctcggcttatcgaactatccatgtttccgatccggttgtttaacactacgaccgcccatggtttactaaccgtctacccgtccggtccatggtggtctgtaaaactttcggcttaacgatccatccatgcggtccgaacgatatccttatcacacccaagggtccgtggattcatccaccggatcatcgtaggctagcccatgaaatccttcttccgtcggccttaggtttgctcgcgtgtccaacatccgttttgtccattggttcccaccgtggactttcccgttggttatccattgagtcaccatttggtcttacagatctccgatcggtttcaccatggctgaggagatagatacatgaaggcagccgcgatattgatcctatatggtgaatcacgttccttacccattcttggtgctttctccctttaccggtaagattgcatccatgggcgatccttgggtgtgttcggatgcacttatccttgtgctttctcgaacacttttctcgatccatcccatccgacgatcggtctgtccgacctgtttcgtgcgacgatcggcctatcccattcgacgattggtctgtccgatccgatccgtccgacgatcggtctggccgatccgatccgacgagcggtctaccagatccgattcgtctctaagacgaacggtctaccctctccatcctctacactccatcgaaccgttgggccgggaggtagcatgcgcatcagttcggtcgagttatactcgccgagccgcaccccctttccgaccaacaactttgagatgtgttgggacacttttaagaatgttttatggtgtctggacgttgtgagatgatcccaaaggccttgggcgtcctcccttatatagggggcgaatggatgcttcccgaagcatcacatccggtccttgcacccttccgaaaggtcacatccgttccttgcatccttccgaaaggtcacatccgttcattgcatcctttgggcgatgcaaccgttcattggtacctgctcgaccttacaccttttggccgagacacctcttcacccgtgagctaccatagtccaccagctcgagtgtcagctgaccggaccacccagctgggtcagtactcgatcagctcaccgagctcagttgagctgtcggtcagctcacctagctgagctagctagtcttccagctggtttagctcacctagcttagctagctaattcatccagcttgtccaactcacctagctggttcagcttgatctttctcgttcttccgactaagtattttagtccgttcctcgaccatgatctcattttctcctaaaacaaaccggcctctttatgaacgagggacgcggtcattacaaatacaagtataacgataatactgtgaatacagggaaatactaggatttgacaataataccgagcatacaggagaatactaggattagacgataatactgagaatacaggagaatactatgatttgacgataatactggaaatacaagtataactattgaaggatattaaaatttgaatttatgtttgtttcaaacatcaaatattaaatagactatgcagagatgaagaactcttaaaaattaattaaaacgaattaaattagggaaaaaaatatatggtcaatatacatgctaatagactctaacctacatattcgttatacttttaagctcacttttgatataaactccaacttagaattgaaattatacaattttatatattgttaacatgtgattacattaaacctttagaatttaatagtgatagacttccctcaactgaacaactagataaatcattttgaaggatatgtaatattgcctaaactggaaaacacgaaatatacaactacgtggatattttgtacaaccaaaaactagggtacaactaactctaaaaaaacggcgtacatgtctaaattactgcgcccacgtggaaatcacctttacctccaaaaattaactttccctccaatttcaatttccccccaaatccaaacaaaatttcccccaaaaccaaacaattatcttctctctctctctcgaaattcattctctctcttcaaatcattctctctctctcttcaaatcattctctctctctctctctctctctctctccttctctctctcgtcggaattcactctccctctctctctcgatctcaaatcattctctctctctcgaaattccttcaatcagctatggatcgattgtgtgagagtgacccatggtatgatgagatgaagagcgctaagaggataatgcaacaactagaagaagtcgcaatgatggaagaaattccgataatttgtccttgtggtggacgcatccttgacataatctctgagaaagacggtgacaaaggaaaaagatactatgaatgcaccgattataaggtaaattgaagatatcatcaatcttgttttagaataattgattaagcaataagaattcatgttttgtagaatgatgggttacacattcagaaactttgggataaagctatggtagaagaggtgaataggttaagagagcaagttgataaccatcaccaaaagattcaaagcttggagtactctaaccaagaagtgctttcggagtttgatgagatccaaaaaaagatggggactttgtggagagtgaggaattattgggtttgtgtgaacttaatttctgtctttgttttgtaagacttttattgagtattctcttatattcccagtattatcgttatcaagttttccattgtattctcagtattccattgtattctcagttttcccttgtattctcggtattatcgttaaatcttagttttcccttgtattctctgtattatcgttaaatcttagttttctcttgtattctcggtattatcctcaaatcatagtattcccttgtattctctgtattatcgttaaatcatagttttcccttgtattctctgtattatcgttaaatcatagatttcccttgtattctcagtattatctttacatcctaacatatcaaattccaattcatatccaaattgaaatccaaaaaaaagcataccaaattcaaatccaaacaaagcaaattgaaatcctaaaaccaagcataccaaattcaaatcataaaaccaaacattccaaattcaaatcctaacaagtacaaccaagttcaaatcctaacaagttcaaccaaattcaatttttggttctccgagttatccttcttgtgaagtttgcttccacgggttttgaaggacctccatccttctcttttgggtccttctctttctctttcgggtccttctctttcgggacaccatctttctcttgatccttctctttcgggacaccatcctcctcttgatcaccatctttctcttgaacaccatccttctctattggatcaccatccttctcttggtccatctcttcttgattctgcaatagaacgaagttatatcagtattacacaggtcttcttccgttatcacagtgttactcagtattacgcaattatcaatacgtacctttctctcctctgctttctgctcatccttgaatgcttccaacgattcaactcttttatccaaatctgaaatcattgttataatttcattcagctggtctaccatcttcttatccaagttttcaatcatctccacaacagaaaccaaactcggaagttcttgtccacctactgcgggaatatcctccgcacccgcaatctttggtcctgcggtgatctgcagggcttgaatatcctgctggtagatctcatcaaacctgattagacggctctctttacgacgcttcaaccaactttcaaccaccacatcagccacgtcaacgtagtcttcttcttccgtgattttttttcatgaggtcatgctcctcaattccaggtgtgatgatacaatcaatgacctgtaaagataaacagtatgaatgaattattataactaattagaatagcaaacgtttcataaaacagtaaatctaggacaactaacctgagttatacccaattctgcataaatggtatcaagaggaaagcctttcaaatggttcttcttgaacctcaccttgcacatcctaggacatccctcatctgctcctgcaatgtcctccataaatgtttccctcaactgtgggattgcctcgaatgcaagaagctacagaataagaaaacaatatctaataacaaatagtattctacagtattatcagtattgcaaataatcacctattaatataagttttaactaacctccatcggaagacagaaacccagaaccgaccatacgtacttctcgttgttggtgactgaaccattaaaatgattcaccgtgtgtgagatggttcctaacatgtaatcgaaaaaatacctcccccattgaaaatttctacaaaacgtgagatcactcacagccttgaggcaaaattcatccacttgaggtgccttatccccggtcttgataggtgctatgataatgctggttaagaaatacaagaccatcatcctcaacctttcttttgatctttcacccgcgggtaccattcctatgagtttctttctcacgtcttcgtgtttcacaacaatattcttgaaatgcttcttcttgaaatccaaatttcccgtatttttatacccaagtgtatagttcttgcaattgaagcccgatatcaatgcgtgttccaatataacatattagattggaacgccattgacgatgaaccacgcttctttcttcctttcaatgcgcgccgtgcgaaaaaggagcatccacatccccataagtcggtggtttgggtctcttggcatgtggaagatgtgttggaaactcggatggttctgaaaccattccctctcggacttgctcatctccggctccaacttatcgaatgtagtcaacacttcgtgaatatagcaccgaattgaaagcttgattttcttcacgtattccgaaggcgggaaatacatactcagcggtagtattgcttttgtttcttcgtcgatctcctgcaacagacattcattcatattactaccgatgttacctagaatcatacacatagtactatcctagtactgacagtattaccgagaaatcatacacgtagttgttttctagtaatgacagtattacccagaaacgcataggtatatcctagtaatgacagtattatccagaaatcatacacatagttctatcttagtactaccaatgttacccaaaattcatacacatagttatatcctagtaatgacagtattctccagaaatcatagtattatcctgttctactagtttcataccattcaaatacttgagaaatacttaccattgacgccggaatttccacttgattttccactgcagtctcatcattcatattcttatcggaggagtactcttcgcccaaggttgtactactatcattggaggactctcctccggtaacatttccctcttcttctttctcttcttcttctttctcttcttcttctttctcttcttcttcactctcttcttcttcactctcttcgttctcatccttctcagaattttcttcctcattgttgtcagactgctctccttcttccactacggtcgggattatggtcggaattggttcttcttcaactcctccctcaattgcgaccggattttgctccgtcgctgatggctcctctgtcgttgtcggaggctccgttgttgccttcgtgacaacatctattggctttgttcctccggctactcctctcttcctcttctttagaggaggaattgttctcggcgccattagggttagggttggagaaaatggctgggaagttagggttatagaaggagaagattaggattcagaaatgagagattagggttctcgttctttgttgtcgagaagagaacgaagaggataggcgtcaaggaggttgagaaatcgaaaaggagaagtttcgaataaggagagtggagcgtcgttgaggagttgaagttgaaaagaaaaagaaaccgaagaaaaattcgtttggagatatgggtcgggtctgggttcgaatagatccaggttcagtgtgtaaatgtttgatttcgattagagtatcttggtaaaatcatcactttacaaatttaaattaaatcaaaaattgcttctgttttttcagggaagatatgaggttttctcttgacaaaaaaggagtttccaaccattttctcgtctgtttcttcacatatccgtctgaatagaccagtctgcctcggaaccgatttcccgtcaaggtacaatgaaccaggtgacgtataacctattcacggattgccccggtgatcagctttcgaatgaatctaaccacctctcaatcagatacatctgctgagagttaaactataatccgtcggaatagtccagctcgcctaggggccgatttcccaacaaatcacagagaatctcatgaggagtaataaatcaacggatcgcccacagagtcatcttttcggaaaagtcgacctcgccttaatctaagatatatgatgagatatataaacgtttatctcaggcaagtgcagtttgtcacaagatccaactctataaaaccagtcagcttcgggatcgtttccttgaaactcctgatgaaataagctacgatatacctatctacagatttccccgagattcagctttccaaagaagccgaccttgcctcgatccgagcggtctactgggagttattaggcctgggcataatacccgaaccaaaagaactgatccgaacccgatccgaaaaacccgattcgaacccaaacccgaatttttaaaatacctgaacgggtctaaactttaaaacccaaaaaacccgaacctgaacccgaataggtacccaaacatatctcaaatataagtactgtatatattaattatatttatacttatatataaaaaatattaggatttttttggatattttagttatttttgtatatttttaaatatattcaagcaaaacaactcgtgttcggttttgggtcggattcggttcaggttcgggttcgagtttgggtttatttatatatagaacgggtcttaaatttctaaacccgaaaaactcgaacccaaaatacctgacccaaacccgacccgaatacccgaacgcctagagctaggagttatcatcgcttctcttcaccggatgcaatctttttgtcaaacccgccgctgtcagaacaaccaacttcaaaacaaaattccaggcgatctagaaagcataacaaggcgttttacctatcaatctgaagatacgaggcttatccttccaacacaatcaacctcacaaatatcgaagctgggtactaagcgttatcactgtttccacgcaacatatgacatctgtcaatatcgcagactcgaactgcgcgaacaactggggtagaaggtagattcccagcgattcaaaacacatgaagagcccatctacatatcgttcttaatctctgaggcttatcttgccaacaagatctattttgcttcattctatgctgtcttccgggagttataggcgtttctctcaagcatgcgtagttatcagaccacatatccgtcaacatccaatctgccagctttcagatcgatttcccggcgacctaaaaggaaccaggacccgatctgcgcatcattatctttctaaagaatccaactttgcctcttttgttgcagtcttgtaagaattctcacagtttttccgcgacgagcgcatcctggccgaaaccatagagcggagttccgctgttatcagatcagctgctttttagatcgatttcccgtcgatctggtagaatatcagaatcaaccttcacatcatcatgaagccccaaggcttatctttctatagagaccaatctcgtctctattgttgaactccttctaggttggggaacctgctacatcatctttgctaccattcttcgatcgcgtcattgttattctcacttgagatcagcaactcaaagttcaacactatcaaccaaagatttcaccgcacctgacgggtcgtcaaatgcacttaagatcaagaagttattcatcttgcttcctgtccaggaaacaactgaaaaagtcctcgatccatgccaagtctgaaacaggatttggtgtatagctagagcttttgcgagacatttttcggacgcaccagaaagagttaaggttcgagtaagtactctttgcgaagatataattacagggaatcctattctttaaacggattatcgattggtgttaatctctatctgcaaatctccttcaaagtttgcccaaaatcatccatactgcagaaatcaggaaacaatgactctgccgcagcaacttcagaggatcatggaagatacatacgacgtctgatctagctagaaactgctcggatgtttttcccgagcaggttatgaattctatcttctgaaacccggttatacttaacaccgatgccccagataagtttctaaacgctcgtaaatgacttaatcagatcgggtcgtaaccgtgggtattcaagtctactaaaatccagttactctaaacacactggtaccgagctaaccacctcgggcatgaaagacaaagcttcaccggaaaacgctccaatatattcactcctacaaaaactcagtcctaactggtaccgagccgatcaactcggaaactaaaacccagttaccataaatactggtgccaagcttttgcctcggccgtttaagtccttccgacttagtctagtaaaatcttgttgtcataaacactggtgtcaggaaaatacagttttttatctgctttggtcttagtgcttagaaatccagttatcccaaataacctggtaccgagtcaatcacctgggtaacaaaatatactaaacccaactttgacacaggtaatttgtacccctgtcaacctcctcgggtatgaaagacaaagtttcttatcgaaatattccaaaatattcattcagaatgtggataaagccatccacgcatgtctttacattaaaaaaaaaatcaaaaaaaaaaaaaaaaaaaatcagaataaaatccaaaacaaagacattgttcgggaacaaacaaataagccttactctaaaaagacatgaatcagtcagtttagatgcgaaagcagctggttcggtcacaccattcatgaagctcgtcgcattaactcttaaaccaacgagctgggggactaactgttggggtcggattcccccacaagcaagaccgagccaaacattcataagaataacaatcaccttatggttaaatatatgataggccccgaggctagaacaaagcatctcgggaccttatttggtcaactatatcggagagttcatagaatggctcgggtggtaatcctatgagcacagcccgagctaaccgcgagaacgctaccgaaaatatctatatcgccttgggggacaatcaactgagctcaatggataagtgtcaagcgtgccccgagccggtacatactgtttgtgtaacgcccacgatcctcaataggatcgttggctaggacttggtccgagagaagaaggtggagtctcggacaagtgagaaggagctgaccataagctcggacaaaggggaaatcatgcatgctaagctaggatcgtaaagaaatcagctgggtcagctcgcccaaagctcaactcagctggaaggagtgacggttactcaggtcgagtgacagtccagctcgggcagctggacgtgtgacggttgagctcgaggtagctggactagtgacggttgagctcgaggtagctggacaaatgacggactagctgggcggttatgggcgaagagatacaacgcttcggaaaggtgcaactcttcggaagggcgcaactcttcggaaaggtgcaactcttcggaaaggtgcaaggaacggatgtgttgattcgggaagcatccattcgccccctatataaggaagggcgcccaggaccattccattcaccacaacacaccgaaaacacaagaaactcaccattaaaactctttccctcttgggagaataaatagtcttaggattcggtagccgggctgtggccgacaataaagaaggagggtcggatcgacctaacctcgagaaggaaggtaagggatcctagactttgtgtctaagggttctaggatgtgagttagtagtcggatcctttaaaggatcgactagagggctgggtagtatccgggtcatatgcatcctacataagactgggtccgcgtagggatcggctgaggcggggacgcggctcgacggagaaccggcgggtcttaactgacctgccgagaatcggccggactgatgcgcgatcttcccctctctgaatcctctccacggatccgagtagtgtatggcatatagagctttgcatggacttgcataagactaagtaaatgagattacttatggctctatcactttcaggaacgaatggtgatcgtgggaaggacttggcttaggcgcgagagactcaaggccgggatgatgggtggtgatagttcggataatctagggatcgattatatgacttgtaatagcttatatgcaaactcataggttgtatcgaatcctttgcttaatcaataaagtatccgattgtttgtttactctattcgtctcatatattgaatcacggaatcatatggaacggattagaataggaaagaacctcataaacggtatcagagcatgcttggttctaggactaggtgttgggttaaggggtatcaccactcgtcggcttgagaatctcgcggtagttgttctttactcttttgcgattttactcggagttatgtggattaactttggaggtttcgcagatgggtaagagcagcaaaacgggaaagagtaagaaggacaagggcattgtcgaggagactttggttgaggaggaaacgatgatcaacgagaaaaccagagtcgggacgatgctcgatgggacagactcggccggacctgaggcctggaagaaatccataaatgaggaagcaccggagagtagcggtgcaagggacagcacggataaccggaacaatactccaacggcccaagaacagtgggatttgatgaaaggaatgatggcgcaactagccacattaaccaaggccgttgtagcagatccggtggtccaaagagtggataaccaaaaggacgatgactcggaagttgtggaagtgaatccgcaaccgaatcatgggcggaaaaggggagactatctgagtcttctcgaacatgtctcatggctgggcacgagacacttcatggacagtacggaccctattgtggctgatgagtggaggagtagactcaagaggaacttcaagtctacccgctaccttgaggattaccaaagggacattgcggtccacttccttgaaggagacgcccataactggtggttaaccgtcgagaaacgcagaggggacgaggtccgatcctttgcggatttcgaagacgagtttaacaagaagtactttccaccgtaggcttgggataggcttgaatgtgcgtacctcgacctagttcaagggaaccgcacggtgcgtgaatatgatgaggaatttaaccgcctaaggcgttatgtgggacgtgaacttgaggaggaacaagctcaagtgcgccgatttatccgtggactaaggatagagatccgcaactattgtttggtccggacattcaactcggtttccgaattggttgaaagggcagcaatgattgaggaagggatcgaggaggagaggtacttgaaccgggagaaagcaccgatccggaataatcaatccaccaaacccgcagataagaaaaggaaatttgacaaggtggataacaccaagtccgatgctaagaccggggaatgcgtgacctatggtaagagccacaacggaacttgctggaaggccataggtgcatgtggccagtgtggaagcaaggaccatgcgatccaaagttacccgagaatggaaccaggacagtccaaggttctcggtgaagagacaaggacttgtttctattgcggaaagactggacatctaaagcgagagtgccctaagttgattgcggagaagcaggccggacaaagggacaatcgcgggggaaacggactgccgcctcccccaaagcggcaagccgtggcatcgcgagattatgagttgtcggaggaagctaacgatgccggaaacttcagggcgatcactggtacgttctcacaactccctattcattatttcaataactgcatttgcattgcatcatgcatatgggaaaggggaagtactcagcattctaagggaatgtgtagggaccttgagagtaggtgacgtagtaacgcgcactctatttgattctggggctacacattgttttgttagtccggaattggttaaaacaggtgggttcaggaaagaaccaaacaccgattatggaatggtacgagcggccgacggacatgcaatgtatccgaccggacttgttcggggcatctcggttgtagtgaacggtgtcaatatgcatgcagacctaatcattgttccactaaagaaacatgatgttatcttagggatggactggttggggaagtacaaggctcacatagatggtcaccgaggacggatacaattcgagagggacgagggtatgttaaaatttcaaggaataagaacaacctcgggaagcttggtaatctcggcaatccaggctgaaaggatgctcgggaaaggatgtgaggcatatttagccacgatcacaaccaaggaagtgggggcgagtgcggagttgaaaaacattccgatcgtcaacgagttctcggacgtgtttgcggccgttagtggtgtaccaccggaccggtcagacgcgttcacgatagaactcgagcccgggacaacccccatatcaaaagctccgtaccggatggcaccggcggaaatggcggagctaaagaaacagttgaaggagttgttggataaaggattcatcaggccgagtagctcaccatggggtgcgccggttctgtttgtgaaaaagaaagatggtagctttaggctatgcatcgactatcggggattgaataaagttacggtgaaaaacaaatatcctttaccccggatagatgagttgatggatcaacttggaggtgcacagtggttttcaaaaatcgacttggcctcaggatatcaccaaattcccatagagccaacggacgtgaggaaaatggctttccggacaaggtacgaccactttgagtttgtggtcatgccattcggattgaccaatacaccagcagccttcatgaaaatgatgaatggggtattccgggatttcttagacgagtttgttatcatcttcattgacgacatccttgtttactcaaaatcttgggaagctcaccaagaacatctaagggcggtgctggaacggctaagggaacatgagctatttgcgaagttaagtaaatgctcattttggcaaaggagcgttggttttcttggtcatgttatctcggaccaaggagtatcggttgatccggagaaaatacggtcgataaaggagtggccacgaccaaggaatgccaccgagattaggagttttctcggactagcggggtattaccgaaggttcgtaatgagttttgcgagcatggcccaacccttgactcgactgaccggagaagacaccgcattcaactggtcggatgagtgcgggaaagcttcgtggagttaaaggccatgttgactaatgcaccggtattggtcttaccggaggaaggtgagccctatacggtttatacggacgcatccatagtgggactaggatgcgtactgatgcaaaaggggagtgttatcgcatacgcatcatggcaattggggaaacatgagaagaactaccctacgcatgatttagaaatggccgcgatagtatttgccttgaagatttggcgatcatacttgtatggtgctaaagttcaaatctatactgaccacaaaagcctaaagtacatattcacctagccggagttgaatctaaggcaaagaaggtggatggaacttgtggcggattatgacttggacatagcgtaccatccgggcaaggccaaccaagtcgctgacgccctgagtaggaggcgctcagaagttgaggcggaacggagccaagtggacttggttaacatgatggggacattgcatgtgaatgccttgtctaaagaaattgaacccttagggttgggagccgccgatcaggccgacctgcttagtaggatccggctggctcaggaacgggacgaggagataaaaggatgggcactaaacaacaagaccgagtaccaaacctcgaacaatggtacaatcgtggtgaacggtcgagtatgtgtgccgaacgatagggcattaaaggaggagatcctaagagagacgcatcaatcgaagttctcaatctatcctgggtcgaacaagatgtaccgcgaccttagaaggtactaccattgggtaggaatgaagaaagacgtggccagatgggtggccaagtgcccgacttgtcaactggtcaaggcggagcatcaagtaccaagtgggttgttacaaaacctacctataccggaatggaagtaggaccacataacgatggacttcgtcactggactgccaacggggatcaagtccaaacacaatgcagtatgggttgtggtagaccgattgactaaatctgcgcatttcatggcaatctcggataaggatggagcagaaatcattgtcgagaagtatatagacgagatcgtgcagttacatgggattccggttagtatagtgtcagaccgagacacaaggttcacgtcaaagttttggaaggctttccaaaaggccttaggaactcgagtgaacctaagtactgcctaccacccacagacggacggacagtccgaacgaacgattcaaaccctcgaggacatgttgagggcatgcgtcttggattggggaggaaactgggagaaatatctaaggttagtagagtttgcatacaataatagttttcaagctagtattgatatgtctccctatgaggcgttgtatggccgagcttgtagaacaccgttgtgttggacgcctgtgggcgaacgtcggttgtttggacctacgatcgtggatgaaaccacggagaaaatgaagttcttaaaaatcaagttaaaggaagcccaaaatcgacagaaaagctacgccaacaaacgtcgaaaggaattggaattccaagtaggagatttggtgtacttaaaggtgatgacctataaaggggcagggcgattcacctcaaggaaaaagttaagcccaaggtatgttggcccgtacaaggtgatcgaacgagtaggggcggtggcatacaaacttgaccttcctccaaaactaaatgcgtttcacaacgtcttccatgtgtcacaattacggaagtgtttaagtgatcaagaagaaagcgtggaagatgtacctcccgggttaaaggagaacatgacggtggaagcatggccggtacggatcatggaccgaatgacaaaagggactcggggaaaatcaagggatttgttaaaagtcttgtggaattgtggaggacgtgaagaatacacttgggaaaccgagaataagacgaaggccaattttccggagtggttcaaggagatgggtaaagatcaacttgatgcggattcgaggacgaatccaattcaagggggagagacttgtaacgcccgcgatcgtcaataggattgttggctaggacttggtcctagagaagaaggtggagtctcggacaagtgagaaggagctgaccataagctcggacaaaggggaaatcatgctggctaagctaggatcgtaaagaaatcagctaggtcagctcgcccaaagctcaagctcagctggaaggagtgacggttactcaggtcgagtgacagtccacctcgggcagctggacgtgtgacggttgagctcaaggtagctggacgagtgacggttgagctcgaggtagctggatgagtgacgaactagctgggcggttatgggcgaagagatacaactcttcggaaaggtgcaactcttcggaagggcgcaactcttcggaagggcgcaactcttcggaaaggtgcaactcttcggaaaggtgcaaggaacggatgtgttgattcgggaagcatccattcgccccctatataaggaagggcgcccaggaccattccactcaccacaacacaccgaaaaaacaagaaactcaccattaaaactctctccctcttgggagaataaatagtcttaggattcggtagccgggctgttgccggcaataaagaaggagggtcggatcgacctaacctcgagaaggaaggtaagggatcctagactttgagtctaagggttctaggatgtgagttagtagtcggatcctttaaaggatcgactagagggctgggtagtatccaggtcatgtgcatcctacacaagactcggtccgggtagggatcggctgaggcggggatgcggctcggcggaggaccggcgggtcttaactgacctgccgagaatcggccggactgatgcgcgatcttcccctctctgaatcctctccacggatccgagtagtgtatggcatatagagctttgcatggacttgcataagactaagtaaatgagattacttatggctctatgactttcaggaacgaatggtgatcgtgggaaggacttggcttaggcgcgagagactctaggccgggatgatgggtggtgatagttcggatagtctagggatcgattatataacttgtaatagcttatatgcaaactcataggttgtatcgaatcctttgcttaatcaataaagtatccgattgtttgtttactctattcgtctcatatattgaaccacggaatcatatggaacggattagactaggaaagaacctcataaacggttagggtcgagtcacttagtggcttgggtcgagagaactcgtccagactttaggcagtccggatcggggcctttcagtttgccccgaagctacatctcaaacgaccaccgagccttgaagaacacccgaggcaaagacttgtaaaaaccattcattctcaaaggatcatttccggaataataggatcatttctgggactttctgaaatgataaaggagaatatctgaagataatgtcgaatcaggaaatctttccgaagcctccgaaaataaggaaaatatacttaggaagattatcctcctgaaccgactttaaggataaatggaaattttctgagaatatcgctagagaggcggtttaacgaccctatataaagtgcctcagggacttcacaaaaggtatatctttggatactcacaagaaagacacaattttatacccaaagagaactacaaatggcttaatcccttcacagggtacgtaggcaatccatcacggatgcagctataccttctaaaaaccctaattctttctctgttcttgagcaaaaccctaatgtatttcataagagattagaacctcttttgtaatcgagtcttggatggaatacctaatgaagagaaattactagatttgttttccctctctaaactaatctattgtgtgaatccttcgttcaacaatttacaacactttaaaaagtctaatgatgataaatttctctgccacgcatatattgttggcatcctagaaagaaacggttggacatacttatcttagaaaggttatgagcgtaatttagaaagaaaaaaaatacttctacgatgcaataaatgtggtttgccaaatttagagggaattgtttggtaagcaaataaatttgcaattttttttgtttgagcaatttgatacacataatacttagattaaacagttagaactaataataaatgttgttacaaaaactaatgtctttaacgagaaggggagttaatctttaaataataatacaaaatattacaaattatatagttcttttattacataataaaaaattattttaacattagaaaaatgcatcaatgataaatatttaaaacaataaaagcgattatactcaaactgtaaacaatctactgcaagaaatcatatataattaaaaaacaataagacaaaaatcttacttataataaaaaagcattcacaatttggtaaaataaatataaatttttgataaattcaaatatattattaataaaaaattaaaatcaagatcatacgcgtaacacgggtatacacgtataagaacttggcccatcacttacttatcaatggaaggacgtttctaccctttggcctaatgaagccctaaaaatacaagttgaaaatacttgggttcacccctaggactgaatccattcatccacccctttttaatgaccaattagaatttgacatgttatttatttaaaaaataaataaattaaaatcaataaaacaaaacaaaatgagaaaacaaattctatagaattttaattaaggaaattatttgtttgagtttataaaatagtgattagggtttatattttgtgattaaacaaaattatattttggtttgggttgataaaatagtggttagggtttagattttgtgattaaacaaaattatattttggtttgggttgataaaatagtggttaggatttagattttgtgattgaaacgaaattatatttcggtttgggttgataaaatagtggttagggtttagattttgtgattaaaacgaaattatatttcggtttggattgataaaatagcggttagggttttgattttgtgattaaaacgaaattatatttcagtttggattgataaaatagcggttagagtttagattttgtgattaaaacgaaattatattttggtttgggttaataaaatagtggttaagatttaaattttgtgatttaatttatttattatttaaatagatgacatgtcaaattctaattagttaattaaaggggggtggtgggggtgggtggtggtgaatgaatggattcaccccctagagggtgaacccaagaattgttcatacaagtttaggggaaaccctgaagtctcacctcagagactctgtttgaactgagtttaaccctattttatttggatgctttaacctaaacttaattctttctcatgaaggggtgttagatcggggaaacgagcatatacattcaggacttcttatccctttttaccacgctctgctgatccagaatggccactcacttttagtggttcctacccttaaatcctatcctcttttcaagcctcatgcatttctctttccctttttcatttagcagatgtgtgtaaaaacgtcggagagaaaggaacaacacaatttcccgccacgaagacggaagaaggaagtaaaagaaaagatttcaacaaaacggcctaagagtttattcttccttggaaccaattcaaaaggtatgctcattagacacggtgtttagaagttctgtttgcccttccaaaaaaaaaaaaaaaaaaaaaaaagagaaaagaaaaataaaaattaaaaagaaaggaaaggaaacattacaaccaagagagtctagtaacatggttccatggaaagaaatggaaacctaagggagagatgagccaattagagaagagagccccctcggaaaaacctaagtctcggggaaccgaaagtaagaaagaagtaaaggagaagaagttgttcaaaaagaagaagtggttggaaattgtggacctcaaccgatccgttcgctcttgcggtttgcaacatctcctgcattcgagactatacggtaatcctaaacactttaactccaccacttaaacaccaaaaacccctttcataccaagcgtcatctaccccgaatgacaccctctagtgagaaagctcacgccaacttttaataaatgtagagggttaactgacaagattcttgagttctcttgttggtctgagacggatggataaggattgcgaacgttttgagtctatagtgagaatgttttaacgtgatgtctttgtctctatgcatctgcaagatatcttttaggacatggtctctgatagtaggagagtttcggctttttcaaatctctccaccagcttggctttgttgtttgcttgtggacaagcaaagtctaagtctgggggagttcataacatcgtattttcgcccacttttaccatatttttattaggtttttcatggagaaatcaagagttaaaggatacttcaaggcatatttcaaatatttgagcttcaaggaagaattatgagttttcatgcaaaaagtagtagaagtcgaccaaaatccgttttaagacagtttctgtgcctcagatatttcacatccgtctaatatcttcccgatctcggcatgagggtatctctatgtaattggaaagatagaagagtcaaaattaacgtcgaagtcgaatcaaagcaatccatgaagccggtcagaagttatggcccgaagagtaaagatatgtcttagaatcgcggttttaaaagtgatcaatttaaaaccgccggccaaggtgacttgaacctgggcgtcccctctagactttcaccgaccactagggagcacaaccacaccttaccttcctcttgccgccgacttccagcaaccctaggaagcccaagaacttggcccatcacttactaatcaatggaaggacgtttccaccctttgacctaatgaagcccaataaatacaagtttaagggaaactctaaaagatcacccacgaaataggctgcctcctgcgcctctcaccgccccaaaaagtcgtcctcctcttgttcttctttaaatctctctttttctcttcaattctcaattctctattctcttcttgtaaaaggaagaagatttatcaagctttggatttcctgagaagatctctaaacccttttctatattcatactctcttttatgcaatttcttattcatatgatgtcgtgttttttgagtatgtgtgagtagatctctagttaggttttaggggggtttcaaagggtattcatggggactttagatctgatttaggttggctgtttctatggttttgtttgatcgtttccattattctttctagttgagttaaatcttaatgcttgtatgtccggaacgccacctagtatttgaccttaggtatttcattccttggcaaaatcttgtttgaatgctcaactgaataaagaactataaccgttgcacacccgcagagtgatagagacttatggactagaatcgaatttgaacttaatgctttgatcttatattttgaaaccatgttagcacctactaaccgatagggtaactaagtacgcaagatattagtgataatagtcggctttcacctactaaccgttagggttagctggtcttgatagagtttcgtatgtccgagaatttggaaataaacaaacctaaccatgttatcacctgaattggaatctataacttattgattgaaatatgatgcccgcaaaaaactcccgatgacctagcgtttcgttttacttgttttacaccgcttttcttattgacatttacttttattgccttttcttagttttcttttattgctttattacttttactgcattctttacttatttcactgtatacaacaacccccactctttcgtttgtcttgatctaggttaactaacttgaattcttccttatacctacactcctgtggattcgatcctcaaatactactccaatatactgtgcatttgcagtagtcgtgtggtctttcaggtaaaagcctgaggaaaaataaaacacacatcaatacccgagatatcgtagttcgaggcccgagagtgacggtttatgctcaaagactgcggtatgagagtggagagagagttgtgagcaataataactatttaatcatgagtatatcgactggatagagagacctagaaggatcgggttggagggagtgcagaccgtagtgacggttgcacggagttcttcggagtggaagagtgaagctagattcgaggacgaatctatgttagtggaggagaattgtaacacccgtgaaccggaaaatatattagggttgtgtttaaatcgccttatttaatcggttagtttaatggaaaccctagagtgtgcctataaaagaaggaaactcgaaatttgggatttggttagccacttttcgttttgtaaaggagaaaaagtgagagaaggagaagaaccagaatcgttagggtttgggaggaaactgtttcgacatatcaaatcgttatcaaaggtaacaaaatttggtagagttattcccaagtcttttatagtcattcttcattttacagaagtggatttggattcaaaatctttgagttattcgcagttttgtgacgggagttaggaccagcggggattgtaactgagatcgtggtcttgtctgcttttagatcggcacaagattttgtgggacgcttcgtgatgtcttagggtagctttttaccggagggatttgttagtaaacggttggttttttagttcacagtttcgtctttgagactgtttgttttttatttttatatccagtttgattcaaggtttttcttttggttttgcttcttcttacaataagttacacaaccaaaagacaccttgaagcaaacgggacataaaaataaaaaacaaacagtttcaaagacgaaaccctaaactaaaaaccaaccgttgactatcaaatccctccagtgaaaagctagccgtagacgtcacgaagtttttgacaaaattttgtgccgatcggaaatcagacaagaggaagatctcagttacaatcccccgctggtcctaactcgcgtcttagaaaacgtgtctcacgaaactgcgaataactcaacgagtttaaatccaaatccacttctgtaaaattgagaatgacgataaaagacttggaaataactatactaaattttgttacatttgacaatgatttgatatgtcgaaactgtttcctcccaaaccctaacgattctggtccttcttattctctctctttttctcctttacagaacgaaaagtggctaacaaagctctaatttcgtatttccttcttttataggcatactttagggtttctattaatccaaccgattaaatcgggcgatttaaacacaatcctaaccgattttctggttcatgggtgttacatttggtttggatcggtttgggtttggttgttcagttcagttttgtttggttcggttgaaatacccacccctattcgaaactttaatataagttttaattcaagataaactttatgtatgaaactgtatttcacatgtatcaaatatcttaaacatattaggacactattttgtttttggcaaggtaatagtttcttttcaacattataaagagatcgtcaataagaaaaaacgtgtgccaaagaaattttactcacaaaactcattagcaacaaagagatcgacacacttttggccatttcaacttttttgttgcggtcctatctcttaaggtttcaaaaggttttagtagaatattgttacaacttgtttgacatgtgtcgtagtgatgatgtataatggtagagactaggtaaagccaacatcatccatgattggatctataagttatattccaaaaactaaagttaagaaaacgtaaaataaaatacatatttaagattttgatgtattatgacccaaaaaaggaacaaagtgtttaagattctggttgtgataatgtcttgttgtcgagtatattagactaggttttaatgttgcatcttttctttctttaacatcatgttctctctcttcaacctaatagacaccctctcaatttgtacattctacaatagtttgcttaacaaaaaagttacatcttatcatttttattttcttctgttacacctaattaatcactctctcaatttttacatcttctcatttttattttctttttaatcgagagtatcttgaatttatttagcaaaatctctctccataaaatatctctcttcattttcttttctcttcaacttttatgtttgaaattattattttactattgatatttaattatccttttttagctattcaaatctttgacacaaacattaatgaaaaaaccatgatgatcgatgttcacaccaccgacaccacagttcaaactttaaaatcgtttatcaaaaatggataacgaataataatgaaggaacaaaaaaattactttgaagaatatgctctatgttatgtcacacttggcgatttcttcatcaaacatgactggaccttttgaaatctgataataaccaatcaaagtgataattttagtatcttaaacatttgaagtggttttcatgttcatatttctacaaaaacacagattacaacattttgttaaccgaacatttcattttctttttacaataatgatgtggctttaattatttttattgttatttaatactaataataatattttataataataaaaatattaattttatttatgtcttcaatttaataagaataataatattgtaaaaaactgaaaaacaaatttagcaagagaaatgtgtgatatattttctgaggtacaagttcttgtaaataaatgtcatcattcgaaactttactatacggtttaattcaaaataaaacttatgtattaaaaagtatttcatatgtatttcaaattaaaatacttttaaagattaatatgaattttagcaacttgacaaaataggcattttgtaaacaacatttgtcaacctaaaaaacatgaagaaagagtagaaactcaaggtaaataagatacaacataccttgtttctcatctaaaagtgagaaggtgtcttaaacctttttcatcaagtcatttctaaagaaacttcacctttcatattgttcacttttgcatatgctccaaaattttgactcaacctatttgtttcaaaacccgtatctatctggtgttttagctgatgaaaactgtgtatctatctggagtttctacgtagaagacaatacttatgatgaaaacaatggcgttacaagcaagtcccatctccaaaatgtcagaggagaggaataattagccttaccatatttttttttgtttaaactatgttagaaatatagaatcaaaacaatattattttataagtcttatccaaagcatattcttatttttgtgcctttaacaaaaaaaacaaaaaaaaaattccatacttatctccagatgttttagaatccaatgagctcaagtcggactcctttgtttcaaaaaccacacaacccttcctctactcattaaatccacaccgttcaaactacctatgcatagacgtggcaaacgatcaatggacaaaacacagattatccaatggacccgcacgtacactcatgattttcccctcccgaataaagttggtttatcttatacagtaactgactgatacaaaattcacataaaaaaaaaaataagacattcatttgaagaaattgaaaggagaggtaacatatgcgaagttgattgagaagattcgcatgaagagaaatgtagatgagacttcgacaaagcttaaagtgagttactttcccttctcattccaaggacgtaagctaagaccaaattatattcgggataatgaagatctagagtgttattttgaggatgtgaatgaagaaggatttagaagtatattgcatgttgaatcaaatatgaggatgaatgagaatgaacgatttgataaaatattaagagaggatttggttagacaaaatgttgtaaataatgaagatacatctctaattgttggaacggatgagattggtggtgctgtccttgctatgtatgtaggagaaccatcagaggttgtggtggagaataaggatatatatttagaagaaaatgtgcgtggaccaattttatgggatgataagcttgaaattacaataggccaagaatttggaagcaaagaagcaatccaaagtttacttgaaaaggatggacataacaatgtctttgagttttttgtaatgaaatatagccgttaagatatgtggtggcatgttcagaagcatataatggatgtgattggtatcccagatatgtggtggcatgtctaagccttattctatacgaaaggattcattcatgatctcggtcaagtacaactatagggcaaagtaaaaggaggggcacaccgactatggttgtttcattattagccaaagattatccgggataaattgtcactccaactctaaaaatcttattgacttggttcaaggaagatttcgtgtgcaagtctcatattctaccgcgtggagaggaaaaagagaagctgcaaatgatattagaggtacaccagaggaaggttttaggtttgttgattattatatgtacatgttacaaaagatgaatcatgaatcaggttcgtatgtggaagtggatgaggaaaataagtttaactacttgttttttgctttaggatcttccattgaaggctttcgacttatgagaaaagtcataattttggatggaactcatatgaagactgcttatggtggaatcctaattgttgctacgactcaagatcccgttcatagtcggtgtgcctctccttggtttgtcattatcttactgcttttggtgtagttgatggtgagaaaaacgatagttagacttggtttctcaagaagctcaaatcgattataccggattatcatgaaattatgtttgtttcgaatagaaaccaaagtctcatcaagacaatagccgacgtctatccgttgtgccactatggacattgcatctaccatttgtctcaaaacgtgaaactgaatgtttatagagtaaaaaaggcataagtgcaaaaacatttagggaatgtgctcgagcttatacggaggcggagttcttaaggttttatgaagttttttcgactacatatccttcaacacgtatatatctagatgattatgcggatgtgacaaatgtggtagatgttattttggaggagaaaaatacaacagagacacaagcaattcggttgaatctgtaaatggtgttttagagaaagtaaggaactactccctattacaattgatagatgcaatagtgggaaagatagcggagtggtttgccaaacatagaaaatctttggaactgataccaagtggacaatatttggatccatttgattgaggaaacgagtacccattccctaccaatgaaggtatagaatgaccttttctaccatgtcgttgagaagataattgggcaactgggggaggtactttataattcctaatactatgttttacgtatgatgggtaatataatagtatcagagaatatgtactttggaattctaacgaagaagatgaagaagtgtattcactatttttgaagtaatcgaaaggagaagtaacagatgcgaagttgattgagaagatttgaaggaagataaatgtagatgaggcttctcattccaaagacgtaaacaccaaatcatactcgagatgatgaagatctagagtgttattttgaggatgtgattgaagaaatagtttgaagtgtattgcatgttgaagttaacaatgatgttgaaccaaatctaagaatggatgagaatgaacaatttgatcaagtattaagagaggactagaggataatccgggctacgcccgatatatgtttgataattaaacttttttttttggttttattaaaatacatatgaaatagttatgtgatataatatcttatattaaaaagaaaagatgtataatacaattaattcttcaattcgatatatgtttaaatttcctctttgcaaatatgtttaaaatttaaatttcatttttctaagagttcttttattaatattagtctatatagtattttgtttcatttttataatctcatcattgtttttcaagtcatctttattttttcttattttatttttttgtttagtttcaaaatataacatgtttaaactgaaagaagacatgtaactcatattttaagaaagtcataacatttgaaatgtcttgtacggaatgaagagtggaagaaaatcaaaggaatttgataccagaataatttagttcataaatctcgtaagaagcggtagtaagaaaacaatagcaattgttgactgatttttggtaggaaaaatattttctttcattttcctattaacaaaatccaaccaattttctacagttattttgtagaaaactattttctacaaaacaaaattcaactaatttcttagtaaattaatttaaacaaaaacaatttaattggttttaatgatcatattaatttgaaacttttattcataattatttaagaatctgaatagtatttataaaatcaaattattggacaaaactaaaatgtttaaaatcaatttgaaaacaaagtctatctacttccgcgttgatggtgaccactatggaatctcttcttgaacatagtcatccatcccaaaagctgactcctatgagcagctgaaacccaaatacgatggggttatcaagtgaatcctcttgagcacctcttcatatttaatcatgtcgtataaggtatgaggtatccatctgttgaaatataaatttttattaaatcaagcagaaaaagagaaagttaaaatcaatgatcatgggctagaagcaagcaagagaggccacacaaccaataatctgaaacaattgtcaaaaacaaaatcaactgcgaaaggaaggaagcaactgatcaaatcaagaaaaaggtaagagaccaacctttgtgtgataagacgaaaatcaccaagagcccggagaacttgagagaaaagagggaacaaacttagagcttgatggagaagattcaagaggatccaacatgaaacagagtgaaaagagaagaattcaacactatcacgataagcttttcaatcccaccatcatggtaagtctcgagtgaacataataaatttctagaaaagaaaagaaacgaaagagagccacaaataactcccatatgctgacgtgtccattagaaagagtatttttgagaatgctgagttggacactttgaaaggtctcgataagttccttttattagactaacaacaatggttttttcattcaacatcgtctacatcatcttctccctcttcctcatcctttcctctctcttccacataataattcaataccaattcaaattttatactctacaatggtttctttaataaaatttaacatcctaccccaccatttttatttcattatttttcttttttttttttatgttttaaatttgtgattatatattaagactaattatagattgaaattaaattaagataattatgaattaaataataattaaatcaagcagaaatacatatgaaatagttatgtgatatatgtttgataattaaacttttttttttggttttattaaaatacatatgaaatagttatgtgatataatatcttatattaaaaagaaaagatgtataatacaattaattcttcaattcgatatatgtttaaatttcctctttgcaaatatgtttaaaatttaaatttcatttttctaagagttcttttattaatattagtctatatagtattttgtttcatttttataatctcatcattgttttttaagtcatctttatttttttttattttatttttttgtttagtttcaaaatataacatgtttaaactgaaagaagacatgtaactcatattttaagaaagtcataacatttgaaatgtcttgtacggaatgaagagtggaaaaaaatcaaaggaatttgataccagaataatttagttcataaatctcgtaagaagcggtagtaagaaaacaatagcaattgttgactgatttttggtaggaaaaatattttctttcattttcctattaacaaaatccaaccaattttctacagttattttgtagataactattttctacaaaacaaaattcaactaatttcttagtaaattaatttaaacaaaaacaatttaattggttttaatgatcatattaatttgaaacttttattcataattatttaagaatctgaatagtatttataaaatcaaattattggacaaaactaaaatgtttaaaatcaatttgaaaacaaagtctatctacttccgcgttgatggtgaccactatggaatctcttcttgaacatagtcatccatcccaaaagctgactcctatgagcagctgaaacccaaatacgatggggttatcaagtgaatcctcttgagcacctcttcatatttaatcatgtcgtataaggtatgaggtatccatctgttgaaatataaatttttattaaatcaagcagaaaaagagaaagttaaaatcaatgatcatgggctagaagcaagcaagagaggccacacaaccaataatctgaaacaattgtcaaaaacaaaatcaactgcgaaaggaaggaagcaactgatcaaatcaagaaagaggtaagagaccaacctttgtgtgataagacgaaaatcaccaagagcccggagaacttgagagaaaagagggaacaaacttagagcttgatggagaagattcaagaggatccaacatgaaacagagtgaaaagagaagaattcaacactatcacgataagcttttcaatcccaccatcattgtaagtctcgagtgaacataataaatttctagaaaagaaaagaaacgaaagagagccacaaataactcccatatgctgacgtgtccattagaaagagtatttttgagaatgctgagttggacactttgaaaggcctcgataagttccttttattagactaacaacaatggttttttcattcaacatcgtctacatcatcttctccctcttcctcatcctttcctctctcttccacataataattcaataccaattcaaattttatactctacaatggtttctttaataaaatttaacatcctaccccaccatttttatttcattatttttcttttttttttatgttttaaatttgtgattatatattaagactaattatagattgaaattaaattaagataattatgaattaaataattttttgaattttgttttcttttttattttttattattaattaaaaagaaaaaataaagaagaaatagaaattgtaattatcaaaacaaataaaattacaaaaaacttaaatacaatacattaataaacacacgacataactaataaaccacacataacctaattagtacaatataatgaacacacaaacttaaaattctctttgatcacgtaacattccaaatcttgcccatatgtgcttgactaaatctgcttgcaattcatgatggacacttgaatcacgcaactcggatctagcacgcacatgatttgtaaacgcatgtaacacctccgttgagaatggttccagtgtactatacccgcttgccttagattgatagttgttgggatttggatagtgaaattggtaattagtggaattttgggtgttaaaagggttattgttaggatccatttcactggaaaagaaacatgaaaagatatagacacgagtttacaggaggctaatggaaaatttatagtgaaagtagatgtatttttttctatgtccaaatcaaatgaaacaagtatctatttatagaatttgaatatgatgaatttcaatgtaaaaataatttaaaacaaataaatattttataagataattgatctctgataatttagaggaaaaaaaaatatcagaaatctcagtaacaaataaaagaataacatgtcctatttacattaactttctcccccacaatttctgtctctaattatttatatgacaagtggcaatgaacggttcatttttaacaattcaatattgttgaatccgatcaataccatttaatccacgtaagattcatttatttattcaatacttcactttaagtattcaactattgaattaatatttttcaataaatcattatagatagttttagtagtagattatcggtaaaattttgtctctggcaaggtagtagcttcttttcaatattataaagatcatgttttaatttttttaacaaattttctattttaaatatcattcaatatagtaagtaaagaagaaaaaccgtgtgtgagagagagttcactagaaaaactcattagcggcaatggtgagaactattgttgtattttttcctttaagtcctgaaatcgacacacttatgactattttcaatattttgtcgcaatcctatttttacatgttttaaaatatttttgtagaatataatagcttgttcgatctgtagtatcgatgatgtccactggcagattcacatcggactgttaactatctaataaaatattaccatgtcataaaccaatattcttatttttgtgtatttatatatttatcaagaacaataaaattaaaatcattacttcgacatagtaattagtgactattactaagagtgttaatacagaagtggaagaaatttatttaaaatattattctttccttacgatataaaaaatattttttgttaaatttttattgtaaatgtaagaatgtataatgtttttttagatgttagacagaatttactttatagaaaatacatatatataatttgatattatatctaattgtgtgaaagtataaacttacattgatgattaaaaatataaataataaatgtatatgagtactaaaactatagtaaaaatataccatttacaataggagtattatatctttattattgatgctttctaaatttaaaagttgaaattatttaaatataggtagaaaatataaataagtgttgagaaaatgattagtagatatttttctaaacttatttgacgctcaaatgagcaagaatatcatgcaattaatatgagaaaaataaactgtgaaaatgaaaagaaggaaattggtctgagttatgaaccaattcaaagaagataaaaagtgcattatagaagatgacaaaggtcacatgaaaatgtgttcgaagagaaattgattacgtcagttcaattgttgtttgtgaaaaataattttataataaatacatatccatttatttctcatataaaaaaatatggaaaacaaaaagagtaacaaattcattactttcatcttcattcaaagtgccaattttattaattatgtaagttgttcaagggttaaataactgattaccaaaaaataattgaaaacagactttatgaatcttatctctaagttatttcctaaatatttctgttaagattttctagaactaaaaagaaaacaaaaacaaaaaatattattcaaggtaatatatttacatctatatactaggataatagtaaaacttgaattttgataatatttttttgattttttcgagaacattttgtgattaaagtacatatagttaattatggaaatgataatttgttcatgataaaataaatcagatatacgcttattcccaagaaaatatttatggtgtcatatctactattatatattgtttcatagtatattggatatttaatattgtatgcactatccttctttttgcacgacccgtctataaggcagccataacatctactttatgtcaccagatataaatcatgttttaggaccattgtttgataatgctttagtcaattggttagatactttactattcagttacatgtgctcagttcaaattttagtataattgtaagaattggaatctgttttaatcttgactgttgaagagaatatatatcattcttgatctttcattatctcattttgtatgtattaagaattccatacacttttgtcacaaccacaaataatctaatcgatgaagtgaacattagatacacatacttgacaaacaacttcactaagtatcgttgagaaatgtgacatagaaaacaacatagttataaagaaatcatcttacagtaatatctaatacatattttaattttacataaccaaactgtcgctcccgcccttccaaagttgctccaattctctctaccttgcgcttgttctctttaaattccctctctctcatcacttttgtttaatgaactgatcttcttcttttttgttccattcttaatcaattgataaataaacatcttcaggtcatcttccatgttgtcatccttatcatttttcttctcctttttcaccttaaaatttcagagaatgatcagttctttttaaagaatttttgtattaaagctctctttttcctcatcatcttggaaagaggtccatttggtgtagtttatttggccacgtttgatcttaaaaaatgaatggcacttgtgtatgcaaaagacacaaatccatcattttcccatgatacctcagctagatgctcttctttcatatggcaattagaacataacaaatagaaataactcgatgaatcatcaacatagggcctgattggttgtgtctttagagttttttcacatccatattttggtctacaactataaatctacaacaatcatattttacatttaatttttaggtctacaacaacattttactttttccctttttttgggcactagaaacatcaaaagctatagtcgtaagttttggtctttggaatataattttatttaagttttatattaaacatttttgataaaaaaaaaacctagcttaagaattatatatatatatatatatatatatatatatatatataataatcaaaccttgagtggcagccataacagagagaagaagaaaggttcgcatctttcataatttttgcccctcctttcttgtgtgatttacataacgaataattaattagtgatttttttttgttttgttgttaactattttctacgtatttatatgattgttatgcttttagatatgacaaacaacgatgcatcttcttctcaaagagaggtaaatactttttaatgcttttatttcagaataagttagaattagttaggtaaatacttcgtgtcatagattattattaaattgacagatcaagtttctcaaacattcatagagttagttctatctcaacttgataaagaaaattggatagacactttttaagtagagaagggaaactaagtgtgaggaaaagtttcaaagaagctattggatctgatttcgtatggaaaacttttggaaatgatcttcaaaatttgaagctctggtatgactgctaccgttgactatgcggctccaccggagtatccatcaatcatagcacatgaataataaccatggataaagaatggtgggattctcgaatacaagtaaacatttcattatatatattaaattattttttcttttattttagaactttaatacgtaagtatagataataatatacaaatctttttaaaatatttaggaaactcaactggctaaacgatttcgtaagagaagtttagccaatgaagatttcttagaaagaatgtttactggatcccatattggagttcaagatggatggtgagttggaaatggccctgatgtgtatcgtcctcaacgtacatatgatactcaaggacaagttgatatgaacacaacttatgttggtgaggattcataggtgccgttatctactccagaagatgcataaaatcagaccaatcagtcaacacaaggcaccattaatccaccttccaatgaacgatcacattctgatcaccgaagtaaacgtaaacgtggggcatcgaacattgacaatcggactgatctatcaaaagctttccctgaacgatcaaatgcaataacaatggcagcaactgagatgtcatccgtaatgacatctgacgtaaccatggctgcacgacggatacatcaaaattcagagattgagtttggctcaatattctattcggatgccaataatttactttcgaatgatgaagttgctcgaagatggtttatagggattcaagaaaaaaagtttgcacttctttatctcaaccaaatgattggtcgtaaacatgacgagtaatcattaaaaaaaaatcatctgtctttgctttaggattttttgggaggggcttttgatttcatatattctatttgattttctaaatgttattgtattggttttctcttagttcacatcttatcgtattttatatatttcttacgtttttatgtggtgttaaatacaaatagtacaattgttttggcaaatggtggaggatgacattgaagatgattctaaattattagatagtttagaataataaatatggtgaagcaaccattgtgtgctcatcccaactgcggtcgtcaatttgtagaagatctaatacacggtcatccatacaaatgtgactttctcctgagaatgcgtctcaaagtattttttgatctatgtgagatcatagaaaaaacatacaagatcagatcttctcaaaatttgtctgtgaaagaaagtggagcaatatttctctatatttgtggtcacaatgcgagtcaacgtagtatcatgagaatgtttggacattcgcaagagaccatatgcagaaaaatttatgaggtgcttaatgtaatggagcttatggcaatagatacgtttaagccggatcctacgaatatcactcaagttcatcctaaattgcagtccgataaataatattggctgtagctcataggaattgttggtgcaatggatggcacacatgtgcctgctatggtctcaggacgagatcaccaacgatactggaatagaaaaagcatatgcagcatgaatattctagcagtatgtaactttgacatgttatttacttacatatatgtaggtgtttttggttctgctcatgacacaaaagtgctttctttagctatggaaggcgatcctaattttccgcatccacatataggtaaatattaccttgttgattcaggatatgcgctacgtcgagggtatttgggaccatttaggcaaacttggtaccatcacaatcagtttcaaaatcaagcaccacccaataatcataaagaaaagtttaattggcgtcattctttacttcgttgtgtcattgaaagaacatttggagtgtggaaaggaaaatggaggatcatgcaagaccgggcatggtataacattgtaacaacaagaaagatcatggtagcaactatggcactacataactttgtatggaaattaggcataccagatctcgactttgatattgattggatgcaagataatgatcatcaccctactttagatgatgaggatgaaacagtggaacaagacatgactggttcgaggcaacacatggagggatttcgcgatgagattgcaatgagtttatggaattctagtaggtaggtgtgagcattgttttattattattgaaaaactcataagctaataagttttcttttaatacacatttattaattttatttaagttttagatggtattttttttatttagtagtaaaaatataaaagaaaaatccaaatatatacctaatatttatctcatgttttcaatttaaaaaaataaaagctgtttttaccaatcatgctttcatttaattttacaatctaaattctacagatacatcaaaaaaatctacagacaaatttctacaactaaaatcctaaagctacaaccacaaccaatcaggctcataatggtgttaaagtagaaaatttcgaatctaaactatgatttattattcatatatcatagttaaaaaataaagtatagattttgtgttgaaatgtaatatctttagtatcttggataatacacaatctttattgttgtcgtggcatgaacattcataagaactaaattttttttccgtttgtttacttatttataaaaagcttaagaaacacaatcttttttatttggatatttgttgagtacaagagaagaggaagtacgatttcacaaataagcatcatccaaactaatacataatatgaaaaaaccaaaaaaacttcttgtaaattctttaaaaatcttttaaaaacccttgtacatcttttaaaaccctttaaagccctttaaaaatctcttgtaaatcttttaaaacccttttaaaatcacttgtaaatctttcaaaacactttcatccctttcaaaacacttttaaaccctttcaaaatctttaaaaaacatttgtaaatcttttaaagccctttaaaatcccttgtaaatcttttcaaacccttttaaaatctcttgtaaatcttttaaaacccttttaaaattccttgtaaatccttttaaaattccttgtaaagaatttaaaacccttataaaatcctttgtaaaccttttaaaacccttttaaaatcccttgtaactctatttcccgccaaaaaacatttttttgcgagaaaaataatttgagggaaaattttgttttcgaaaatttttggcgggaaaattgttttggaagattttaggcgaaaaaatattaatatttcattttgttaacttaaaacaatttctaaataggggtaaaatggtcattaaaaatttaaagaaggtagaaatgaaaatggctaaaaaaagggtagagttgaaaaggggcatcttgaaaagggcatttaggagaatttttcttttataacaatgtaacaactgattgtttttctgtaatcaaatttcacactttctttctgaaaataatgactccaaggtaagaacggtccgaaacatagaatcttacgaaagtaaatcgactaataaattaatacttgataaattaataacctctataaattaataaattcttccggtccggagtagagaccagtgtaaaaagtgacacaaatcgataaattaataagataataatgttttttgaaaatcctatgtaaatttatagtcccataaatatcataaattaataattatataaataaatcaactatatatatattatatgtaaaaacttttcttgaaatatatttttaaatttatatttgttcttatttgaatttagttttaatattttactgtatcaaaaacttttggtgttgttttctagacatgattattattttttacttgtaattggatgtagaaagatattttctataatgtttgaaatcttatagaatttattaaaaagttactaaattaggaaaatctctccataaattaataaattttgcagtcacaacattattaatttatagaggttttacagtattttcatttgaacatagaggaaatattattttaatttttacttaaatataatttaacgttaaatattttttttaaaattgaattttttactatcttttttttttaatctaattttaaattatattcaagaaaaaaataaacgtttatacatatacatgtaactttgtcttaaataaattaaagaactctaaggtgttcttcttgatccaaacatttgaatcctaagaattttttacgatcatctatatagaaacattaattttataacaatgtcacaaccaattgttttttgtaatcaaatttcacactttatttcagaaaataatgagtccacggtctgaaacattaaatcttacgaaagtaaaacgactattgtcatttgaaaacagaggaaatattatttgctacccaaaaaaaaaaaagtttttaatttgatcaagttttcaattcttactgtggatatgattctctaattcgtcaacaaacttatcagcataactactcaacaatccaggactaaccaaagtttccttcagtttcttatgattcctcctcactagattcccaatctcactatttttatccatcacagatttgaccgtatccctcaagctctccttcgaaaaccaaccagtaatttcatctctctttactttcacggagacctcgagttcttcggtcaacaatctcgttgtgagaacttgatcaaccaattgtggaataaacacaatctggcaatcactaaccaaagactcccacattgaaccgaacccgcaatggttcacaaagcaacctattgatggatgagacaatatcaaaggttgttccacccatcctccccaaacaattccacgccctttaatccgttcttcgaacccttctggtaatgcttcttgaatcgttgaagaccctctcggtggcataaccgctaccaaaaaaggtagacccgtgagctccattcctaaacagagttcttgaaattgatctatctcgaaaaagaaatgggtgccaaacgcacagtacactaccgagcttggttcaaatccgtttaaccaattattccatcgatcttctagcggcttaccactcttcccttgtggatcaaggaacattggaccggttaagagaacttttctctgacattgtctttcgatgaaatcacataagttaccttcgatttctgcacatgtccttatggcaatgacgtcgcagttcttaaggcctgtggtgactcgatcaaagagaaatttgcgggtgtttgcgaagagtgaatagatgttagcgtcatgtccacgtaatgctacttttgatgaaggaaacccaggtggaggagaacctaattcagcacgaggagcgaaaaacatagctataaaagctgccgatatgatctggtaacttacacttttgattcctaattcttttgccatttgtggaatccaatcaacaaaatcgaagaaaattaggtcaggtttcaaagaacgaatcttaacttcaatctgttcgcgtagaagatccatggcatcagcgaggactctcttagatgagttcgggagatccgcggttgtctctgcgccaacagggagaccatcaacatgaggaagagtaacattctcgaagtgaatgctgtttgggaacaagttgagaggttcgagttgtttctgagctttcttgggagccaagaaagtaaccctatgacctttttcagctaatttgttagctagatgaagatacggaatcatatgaccaaaaccaaaccatggataaagaaaagcatgaaactttgaccccattttcctttcccctaaattgtcaaaacctaaaacaagaaactcaaacgaaataaaaactttgtattttctttctaagagaaaaaactgttatgtgattgatgcttctcgtctattcaggataccactacatgaagcaatgaacgactaatttaatggtattttaggttaagtgtgattatcagtgaatggttagttgaattaggtgggaattattagtttactttaatatataaaaccaaattattggtttactactttacttgtttcatgtgttagtgtggttgtcaagaatggttgtggttgccttttcatttttgtccttatagaaaaattgtttgagtaaatttcattaatgtattacgtcaaatagttgcatattttaaagaaggcatacgttttatcacataataagataattggccgacaaaaaaaaaacaaggcatagagacacgtataagatttttaatcataaaatataatgtatttaaatatttaaatgttatgtatatttaactttttctcgcaattttgtttttgatattcgaatgaggttttctttattactatcgacggatacattgggattttggaaagaaattattcattgaagagtaaataattttgtacacgctcaaactttttaatgacaatgtattttctcctacgtgatcgaggttatctgatgatctcttctattataatatattatttggtttacattttgtgattgaaagttttaacttaacagctttaacaaataaaaaatgtttaagaccacgataagggtttactatgttggaattatggtttagatatgagaaaataatattgcaaatgaagaaaaacaacattgttgtagagtaaacacaatatgtttttctagaaacgttagaaaagatttctaaaagcttttgaaagtttccaaattttttatctttcaagtgaagaagatggacattatttatacagtgtaaacacgtaattttataaaattatgtttttgttatccacaagcaatgtgctttcttcaattcaaaggtattttcgtaaataaaatgtattatatgctgaagttgaacagtaacattccgaaaattcaaaagaatctttgaagcattactataataaaaatactaaaatttgcaaaatatacaaagttgaaatcttgtgtaaactccaaatcttaaaaacaaaataaattaaactttagaaagtctaccaagtctcgctctacgaataacaaactctaaacctcagctgcataccgcttctcgtcaatgctctctgcacggaatcagaacttatgtgagtgaaaaatcgctcagtaagactacaaacccgaagaacaagtaccaacacggtctgatcccgcacagaataatatttacgtgttggtactaacaaacatagtttcaattcaattaattttaaataaagtaaagcacgtcagaacttatgctagcaaaatacataattaaatcataagaacataataatatcatcagacagaataataacctcagaacaaaacgagcatgtatccatcaatgcacgtcggaatggtacaactgcagcattagtcgacccaaaccatatactgacagaatatttacataatatactcgatagagatgttggcccctaacgaggtgataaagaagtacggtccacggaattaaccgacctcaatcccactaacaaaatacataataatctgttggcgatgccgactaccacagattgcacaatagagctgtaacaacccgtcccgtgggacccgcccacgtggacatactcctccacgtggcatcatgttggctctgtatcgcatcgatcctaacctctctccttgggccacctaagcccacaggtaggttattggtgcgcttggcgttccacgaactcaagacctcaccctataacaacgttcccacaagacaagctgttaccaattgatctaagtcgacttttatataacaacccgtcccgtgggatccgcccacgtggccatagtctgtcacgtggcatcctgttggctctgcagcgcatcgccccatgctgatactggtcttaacagaataacatatcttattatcataatatccaaattaattatcgaatcaaacaaataaattttcaaaaattaaccttcaaataatttaattgattatttaaactcacatttaacatattatacgaatgtaccagtcttaacagaataccatattttatttctaaatagaataacatatcttattaccaaaaaacatattcatattagtttatctagataaccaaattaatttttacaacttatcatgcaactaatttaattaattagttttctccctcctaaaatattatacaacggaataatatctaaaagggatttagaactcacctgacaaagatattcagatattcagatcgaacgagtgatcaaccgtaattccggacacattccaaaccaccaaacaatttacctaaattcaaccgttaataaaaaaaatacctaaactacaccatcggaaagataatttcaagtgaaatctagaacaggtatctgatttgccaaaaccggtttaaaaagagccgaaccggtcagaattgctatgggtttaaaatcaaaactcaatcaattccaaattagatttcaaaataatattctccatagacataaaattccagaaccggttttaaaaccttaagaaccggcttaaataaattgcgatttgactatgaatcaacaaaatttgaaatatttaccaatcagattccgatcgttttcgactttcgtttggtgaattttcagcgacgttggttttttattgaagagagctttctaacaaggtatagatcaagttctaattcttcctgaaacgaaatccaccattaaagagcttgaagctcacttccatggagaaaatttgaataaggaagaagatgaggcttaccaaactcttgtaccaaagctgaatacaacccagaactaaagctctaatatgaagaagcacgatcaacctaactcacaacaaaatccgatcacaagttgccctaaaataatcaaatcgaagttgatgaagaaaggtcttgaaatctcatcaaaacttccaattcattgtaatcggcttctaaatcgttggggctttaaaacgcatatatatacgatatattagggttgagagatagagatttgagttgccaaaaactatccctctgattttggaacgatgaactcgagttgccctcattttttttcgtttttgcagtttagtctctgaacctttctttatttagagattttgtcttggacttttgaatcaatcagaaatctccctgaagttatacagtttttaaattatcaaattaacttttcccctctttcaaatttggggtgttacatgaattacccacagcaagaaactgaaaaaagttgaaagtcgcatgtttgatgagggccggcccagacctaaaacgtaacaaacatgtgctttaaacattaaaatatatttaatttttaagaggcatcataattacaaaatcgtctattgtgcagtggtatttgtcaattcaaaaatttgaatgtggcgggttcagaatctgaactacgcaaattttagaaattgtttagggaaatttgtaagtacaaccaacaaaaatttaataattaagtaactaacctaataaaaaaatctcatatgatattctccatatttttcatattaagactattttacccttatattcattatagtctttcatctcttatctctcaattttttgtttataccaacttaacaaatatttttctagaatgttactattattaataattttgttaatttcacaaatcaaaacctaaatttcattacaaaatttataaaatttattgcttgggttccttatatactatcatttcttagggtttagttttatctatttaaaaacaaaaatcttgtagatataaatacaaataggaaacccactacaaaaaacaagggatctaaagtcactttttaaatgagtattattatcaaaaggcccattatctctctagacctaaaaatcctctcccttctctctaaaaacaaaaggagctgccgcctaggtttttccggtttcggtggcttccacagcaccggagccggtgaaactctttctctttctttgttttatctctttcctttggcacatctatgatttttcttccaacggaatcaattctagttttctagatctagatttttaaagcttaatctcctcatccttgggttcttgatgtttggatcttttgtctccgccattcttagcaccagttctggtcgtatccttcttggcagaggcagtcttcaaccggttcttcactgcctcagatgaagatttttcaccatcgtagatctagatcttcttcctttcttcaagagacattctttgtgtctctaggctttggatgtgtctcactgcctccgtggctccttggagcagtataaagtggatcgcacggcactttcattcggttttatcttgtggtaaaggagattcttgtattataatccgtttgtgtgtttttgtaagtctcaaatttgttttaatttgctaggtttaagttttgttaaatctttttttggatatctagatgctgatccgggaagtattaatggatgttgttagtttatttgtttgggttttcccctttgtttaccttgtttagtctttgtctccgggagttttctgttactcgccggctaatgtctccgggaggtttttgttactcgccggctaatgtctccggaaatgttcatgttcttgccggctttattgtcacagtggaggaatcgatcacaatcttttgtagcctgcctagggctactctttttagctatagaatctctttgaagttcataaatgcattacttaggtgtagtgatttttctgtagttgattgtcctcattccttttgtgcttttgtaaacaacttgatgtgttatatcatatgaatcattcagacgaaaaagtcactttttaaataccctaacgtcagtttaaaactaactctaacaatataaagtcacttttcaaaatgacttaacaagtgatgacgttaagtgttttaacatcacttgaaaaactaactttaaaactaacgtcaaaagatacaatgggctttaattctttaatgggctttaattttttgtctgaatgcaaaacacatttgcatttacacttatgtcttgtctgaatccaaatacatattttctgaattctttacattttgtccgaatcaaagctgtaaataaaacaagggacaatagccaaaagaaatcaaatatctcaatagtaagaacaatacataatatatagtttcatgtttagaaagtcaaatagaaaaatacaagaatattgtttggtatacaattgccttgttctctttcaatttctttttcaatctgatatgcacatcttcttgtacctcttctgaagcatatctgaaatgaaacaaaaacatatatggcagtctcaatttttctcatttttacaactacaactttagacaataataacactacttgtcccttttgattccttaactataatttagccttaactacaaacgagaatcactataacaacaagatctttttattccacaactacaacttagacgataataacactacttataccttttgattctttaactacaacttagccttaactacatacgagaatcactataataacaaaaccatccaagagagaagagagaagagagacatacaagtttccatccaaatcacattaatctatgttgtagttcaaattccagttcttaaaatgccattttcctgaaattccagttcaaattcaatttttagctaaacaaaagaaccatgaattcaattgccattgcaacaatttcatacgccaaaaccgtcacatgtacataaacttttgttacctggtcactgttgatactagatgattgatgaagatcggttttcacttttttatttccagttgttgcacttgcagtcacctataaaaaataaagtttctattatcttcatgatatgataacatttggatcagaaagaaattgtaacttacttggaattggctttttgatttaacaagaacaagaagagcatctgtcacaatgtctagcttctcttcaagtcccttcaaacgagtcttcatctctaaaatttcagtattagacgtcatagattcatgattcaaaagatacttggatggtgttactccacgtcccatacatcgaactcgacccgaaggttcataaccaaatacttgttcaaatgcatcatatggtctagactcagtactcgtctcggatgcttcatcttgaatattctgagtcattacttgggaaagcttatcctgcaaaacagacatgattaccaaagtgaaacacagaaccttcaatcaaaaagcaaagatgacaagtttaccaaagtgaatcttgcttcgttgcacaataaactttcatctgacttagtccttgatacaataaaaagttcagctcgatttggttctttgcttgtctcctcttcctaataaatggaaaattacaacaaattaaagaggattaacggaaccataaatctgactaagggtttaataaacgtaccatttcattaggttttcttgctaaactctttctttcaagtgtatgtggtattttatgattgtttcgactattaatattacgctctctcactttctttattacaacaaagcagtacatatttatatgtgatatatacaaactataaagtagggtaagcagattttaataggttttaccttagccttatcagtgaactgtatttccacaaattctctccattgatcttctggaattagtcctcgtcttgcttcaaatgctttctctatagtatttcttctatacttcatccaaatatgttgctttaagtctttacatctacctcctaatgcagataaaacatatttcctcctcctccttgatttttttttttctgtttttatttaaaactagattttaatccgcggtacaccgcggagacaattcattttttaaaattaatatatataaaaatttgtaaattattttatagtttaccattgttactaagtaacgtcctgccaaacccgtcctgccaaacctgtccacaaaaaaaactaattattttattaatattgatcttatttataatatgtttatgaatcattgtcaaaatcttttagtcgatgcgggacgttgaacccacacattttcgccaattggttaatatatgttcattcttaaaatttcgaatcacaaaatatgacgaaagtttttttgagatttttttaaactctatatattatataatgatgttaattatttttgatagattaaactttttataaattcaaatattaataatgttttatgaagtttaaatatacaaataataatatttaaaaaattaatattttttgccttttaggtaatgatataataactctaaaagcaaaaatttagaagatttaaatctttaaataaatattttcatgtctaaataattaatgtgaagtttatgctaattttaagggattgatgtgaagtttgtttggattaaatttgattgataatgtgattgacaatttaaattaaaaatttaatgtaaaattaattattttggaaaaaaaatttaatgctaatagcattgggttgtaaataagtccaactctatgatttatttgctaaaatggttgcaaaaatgtatatatagatggtgagaacttatccaaagtaaagtataagtaactattattaaaaaccagagattatgtatatgagaagtaatgaaaatacctgaataactctccaagccatttctgttcttgggaactttcctccaatctgtatagttaataggtattatattaaaatcattacttagtgagcctaaccacgaaccaagcaaacctccagaatctttgataggttgtcctctcctgttaaaatcaaccataacccgccgatttagcatgctccacacttcttttcctaaaatcttttcctctgtaatgtttctataaccatctatgacatgaactctccattttccactagcttattctggtccaagaggaggtggggccaaagaatctgtctcatacatatttaaacctacaaagatagaaacatagttgttagaataatattgaagtcataatcaccaagcaaaaaccaagcaaatataatcaacaaatataatcacctccatgttatcatataaatcacatggaatgtgagaactttcaagatcttctatttgcctcactaatctaatattgaaaacattatcagatataatcattgaactttgaacaggaggatcttcaatgatgacttgaggaggaaattcatctgaactagtaggatcttccatattatacaagtctcttggttggatatgtacaacaacactccattctttttcttgtgcatcttccacatagtacaccaatctttcttgagatgccaacacataaggctcatcttcctcaccacttccaatgtgtatcaaacgagagaactttaccaaagtgtgaccaaactcatgcttcttaaatctttgagcatcacgagtatctacccatttacatttgaataatacaactctaaatgaatcatagtagttcagttccagaatttctattaattttccataataagaaacatctctagctataggattattatcgcgagaactagcataactaatggtttcagctgagacaaaaactccactattctgaattttcaaatcttggtccctttctataatcctaaaattgaagccattcatattatatgcggagaactttattaccttactagatggaccaggtgtaaggcaacgaatatcagcagaaataccatcgagaccattcttttctaccttttgcttaagccattaactcaaatggagatgcacatgccgatttatatctatcacattacctctttttctacgtcgtaattgtgatctttttaattcacttttaaataccgtataaattttcaaaggaaggcaaaattactatgataaacgagcataatcaatataaaaaatctttcagcgtaaagtagaaaacttacttgcgatagtcatctaataatgaactattgactagaatgtatcagtgcgtttgctgcctttctataggactaagtgtatccaatatggaagcaccaactggtctcctaagagaaggaaaaatttgtggaatttgtgattcaagacctaagtcatgctccaccgtagtgtgatcatccactctaccaacacgattaaatcttgtttctatatcatcaagatacatagagcaaaatgtaagacactcatcaacaatatactgctcacaaatagacccttcaggttgtgctccatttctaacataagacttgaagcgaccaaagatcctttcaattggatacgacgtatatatgtttgaataaaactatgtttcggtggaattgtgaatgattttatgttttttttgcaaaagtggcaatttagaaaaaaagtaattaaatttttaacaaaccaaataaaatcatcattaacgataagctcttaataaaagtctcttgacaacaaaacaaaaaaactttttgttacactatcataatttaaaaaaaaaaaaacaaattagactcgttttaccgaattaaaaaatgatgatatcaatacgagagtgtggcagacgagagatcatgaattttgagttccaacgtaaaaatgtctacattatcatcatgagattgtggcgagatcatgaattttgagttccaatgtagaaatgtctactttatcatcatttaagtgacaaacgagaacaggggatttgatgtaatattattggtgccaatttattaacagagaaataaaacaaaagcaaaaatatcattatagtgtgaaaatgtgaaattgtacttattatgatttgtcattaatgtcaagtgtctgatctaaacctaaattattctttcattgcaatttaaatattgatttttagtggcttttgttatatgtaatattggactccttcacgatatatatatatatatattaatgagaatgtcgaaaaaatatatatttttagatcctcaatctggaaacattaggcaaatcaaagatttttatataaaaagatcatgaaacttaaccattaatattctttaagatttggaatcttaacttaatgacaatattaatcatttaactctcatagaacaatggaatcataaatgactagatgagaatattaatcgcttaactaaatcgtttaaatattatcaaaattaattagatgagaatatgaaacgatttgaatatcattattagggaatatttaggaaagcaaatattatcgcaattaattagatgagaaaaaatatatatataaatattctcttcactaaccgtcgtcttctcacaaaccatgaaaagcttctctcttctctttcgctcgaatattccgattttctcctttgacatttccaatgacgaagaaactcgatccactattggcaacttcaagcgacgaagatgacttcgagacttccgaagatgatttctcttcatttattccatctaaattgaactggacctcctaatttcacttcttctatcagatggatggtcaaatgtaccattacagtgaaaaatgatggaggaaatatcatttctaaatggcataatgtaagtgtaatatgctcatgtaacttatccacatcttgaatatccaatacctttgaacttattttcccaaagaagcgacataactttgtaataacaaacgagactggaatatttaggaaaacaaatattgtcgcaattaattagatgagaaaaaatatatatatatatatattcccttcactagccgtcgtcttctcacaaaccctgaaaagcttctctcttctctttcgctcgaatattccgattttctcctttgacattttcaatgacgaagaaactcgatccaccattggcaacttcaagcgacgaagatgacgtcgagacttccgaagatgattcctcttcatttattccatctaaattgaactggaccttctaatttcacttcttctgtcagatggatggtcaaatgtaccattacagtgaaaaatgctggaggaaatatcatttctaaatggcataatgtaagtgtaatatgctcatgtaacttatctacatcttgaataaccaatacctttgaacttatttccccaaagaagcgacataactttgtaataacaaacgagacctcccgaggcaaaacattacgtatagcaatagctaacaactaacctatcaagatgtggcaatcatagctctttaagcccaccatttttcgttgattcagatcaacacaagaagaaatgtttgaagaatatccatctgtaagctttacactcttcaagatagtaaaaaatctatctttctcttgtgtactcatagtaaaacatgccaaaagatatttcccattatcattagagcacaactcctgacgaattccaagctcttgcaaatcttttctagcactaagattgtcttttgactttcctttgtcatctaataatgtaaagatgaaattatcaaatacattttttcctatgttcatcaaatcaagattgtgacgtaaaaaaagatgtttccagtaaggcagtttaaagaatatactacacttcctccactgatttttctgagcttctatcatgcgcctcttctttccaagagaatctacattctttcccaaaattacatcaatattgagaataacagttcctggtggtgtaataggagcagcccttgtttcaatacaaccatcaaaatgctccttatctttcctgaaattatgattatgaggaagaaaccggcgatgtcccatgtagcagtttttctttccatgacgtaaacgaaattccatagcatcataattacatgaaggacaagctaatcctgtgtatatgttccacctagataaatttccaagtcctagaaaatcactgatgatccataacaatgttgcacgcatacaaaatgtctcttttgaagaggcatcaaaggttaaaacaccatcataccataactcttttagttctagtataagggtttgaagatagatatcaatatcattacccggcatgtgttttccaaggattatcaatgcagaatcattgatgtttgcttcattgacatccaaggcggaagattgtaaggaaataatagcacatgccatacactatagtttgtactcatagaaccaaacagattaaacccatcagttgccaatcctagtctgatattccttggatctgttgcaaactctggaaattattcattaaatattttccaagcttttccatctctacgatgccttagcaaaccatctttattctcagaattagcatgccacctcatagatttagcagtttttgatgacatgaaaagacgctgcaaccttggtttcaatggaaaatatctaagcactttagcagcttgtggctttcgtttctttttcttgaacttgaacttgtgtttttcatcagcagcttgtgtttttcatcttgaactttcacagactttgcatgtgtgtctagatgcatcatcatcccaataaaacatgcagtcattgggacacacatgaataatctcatagttaaatcctaacttcttcatatcattaaacgaatttggcagctttgcatgctcaaatgcttctttcaagagatcaattatcatagacatccctttgtcacttatccttgatatgcatttgatgtgaaacaacttgatcatgaaagataatttgctgaacgtgtgacacccttcgtacagaggttcatgacagtctgataacaaatcatcaaatgcctcattttacttggaatgatcctccctaggactattaggagcttcactaaaactattactcatacttggaaaaatatctccaagcatattcatagttgggttttcaaaatgatccacattagattcttgttctactcttgttgtctgatcctgaaaatctagttcctcaccatgaaaataccaatttgtatatgaaggtagaaacccataacagactaaatcaccttcaacctcgactctgagcttgtgtttagtaagacaacaacgctgacaaggatattttatcatgataatcttactattaccaaaggcaaaatccagaaagtctttcactccacttatgtagtcttgagaaaaaaaatgttttgttatccaagatttgtccattttacaatcagtctatgaataaaacaaactagttatgggataactagttaatgactatatttgaaatataaaaaccctttgattttcatagaaatggaaattaaacactaaagagaaacgaagcatcataagcagaaatgaaaatcaagtagcagtttatgtagtaaaattattatgtgtagcagttcttttcacaagaagtttagcagtttatgtgtggcagtttattattttcagtagcagtttatgtgtactaaaattatctaatcaaggcagtgagatcaaatcatttttcaagtggtgagatcaaaggctacacatcattcacgactcatgcatctaatcaaagcaatgagatcaaaacataaacatcattcacgactcatgcatctaatcaaagcagtgagatctaaacataaacatcattcacgactcatgcatctaatcaaaccagtgagctcaaaacataaacatcattcacaatagctaagttttcttcacgaaagatgagaacaaagcattgaaaatgaccacataatcataatcaaagagtagtaccttgaataactctgaaatatgagattcacgcctcttggaaattctacctcaaattacttcacgaatccattgtatccttcaccaaaattcaccacaattatcaaatcattgagctaatccagaaactaggttagatttgagctgtttcgtcataaacacaacacaaatttaaaaaattacaaccatacaaacctttagatcccgattgagcttcaaatcctaatcgagctttcgatttgaccaaacaacgaactgataaacaaaaatcaaagcgatctctatggaagtgaaaatcaaagcaatctctgtgaaaaatcaaagcgatctatgtggaagtgtcgagaagatttttgtgaatttagttaagtgtcgatgaagaagatgaacattattgggcctaatgggctactaagttgtattgtggtaaaactaaattgatggcctttttaacaacgacaaaaatattgagagaaacattaggcttactaattaattagattacgttactttatttagtcagtttaataaatgaacctcaattccttcctttttcctaaattaacatcagttatcaaagtaacgttatttaagtgacttaatccagcttaattcttgtagtgaccatcaatttaaaaaaaaaagtgagaaatatttcctatgtgaatgcatagttgaacctacggcacgaggtttgtgagaaataatttttatcaaatttaaatttcagaattagaatctatatttttgaaaagatatataacaaaaaaatacaaatgggtgaaaactaaacttagtgttactaaatcatctcaccaaccactccacacgaaaatagtcttttcccaacccttatatgctactttcttaatttatatgtatataatattatattcttaattaagttatcaaatatggctagttttgcaaatcacccaattttttagtaggcctcgaatcgagacatcaatttggaaaacaattaaacaagtaatccttattgatcttaccaaggtctgttattacatgaaacaataacaaagtttcaggctccgtgatcgcaacccaaactcacgcatgagttgtgatatactctatatttatcactttatcatggttgttaagagtaattttattgtgtttcattcgtattttcattgtgttttgttgcatttagtgtcctatagtgtgtttgtgtgtattttggtgttttgtgtgtgttttatgagctatttcaggttaaaataatggaggacacacatttggatgcaaagaaaggaattgatgattcaaaaccagtccgaagtccctcaaagatcgactcggatgaagatctttcattgagatttagctttggacctctccacgaaagttataagcaattgagtgagctttctaatggatgtcattgcaagccaatccgagctactgtttgggggttatgtatgttttcgtacacatatgttagtctggcacgaagaagaaactcgtctataaacctctcttgaatacggacagagcatgttctccacatctcatgtatactcgtctagttaaaagtttgtcaaacacaaaaagggagtggaaacttggctacagagcaaatagaaaaggaaaaaaaagaattgttattacgagaatataagcacacaagcaatttcacaaagtttggtaatgtgcctaattctcaataactttttattaaaacatatgtagacaattaaaccctaaactttgcctaaatggaatttcactaagacacccgttagttcgacttcaacaaattcctagtgaactttagacagttacattgatacaaaacctaaggactactctatttctctcaagaacaactcaaaatgctttttattggtgtttgtctctgtaatggccgggcctcaaagaaccttcttttctttactttttatcatctactttaatttatgctctctttaatctagaggatttgaaaataaccaaattatctttactgtaccacaagaaaacaatgctataagatataaatttattaattaactataataatatatcccatggaaatatttcagtaatatttctcggaaatacgttctcttggaattcttttggaaatctcggtcctttagatatccctcggacatatttgtccctaagaaagtcctcggaaatatggtgttcttgcaaaactgaaatgttggagcatcgggggtgtgtgtcttgtgctctaacgcattagaaacatgagaccatctcttcttcacttctgattactctttcgaagtcttgtcagctcttgccaagaacatattcagctcaaggtacacaaatgtctggccatcgatcgttctctatgtcttccaaacctcgatccacacattatagagagagaaaaacaaaatgcggcatggtccgatggattgaaaaacaagcaaatactcatctatcatatattcaagctttaggtgacaaacgtcgttgtagaaagggaccgttagtataattacaatgtggtttggttctagaagttaaaatttgtaaagtctttttaaaaaaaataattcagagtcaaaacaacgttgaatgtaaaaacgttattttttctttgaattttatttaatattacatacaaaaaaaaagagaaaaacaaagtgtattttaggaaaaccttatgtttacttgtagatatcttttaattcgttagttaatactattaactcatcatcatacatattcaagctttaggcgacaaacgttgtaggaagggaccgtaagtaggattctagaagttaaaacttgtaaagtcttattttttaaaaaaaaaattcagagtcaaagcaacactggatgtaaaagccttattttatctttaaatttaatattcttacatacaaagaaaaaagagaaaaacaaagtgtattttaggaaacatctgttttctggattttaaaactttcaataggttatttagttattcaaaaaataaaatgagttattgtaactaatcacccaaataaataatcacagtttaaatatctatattccaaaatatattgatatctaattgtagaattaatttcttaattatagatagttgcataactggtaattatttaagaactttaagattatatttttctacagtacttcatgttaacaattttagtagtcttgaggtccgcgtagcgtacacatcttaaaccagtctggttctatacttaaaccaattggctagttttaattgtaatccaaaatacacatcttggccaattcaaaagttaattactaacctaagaacaaaccgagatcctcaatccataaatgcttctatacttaaaccagtgtggttcatgattagagataggttcggatgatacacaaaacatttccataaaccacacaaaaaggaaaaaaaaaattacatcttacaaacattagaatcaaagaccctaaagaaccatttctaaaccattttgaaacagataaataaatatgtccatctcacatttcttcaaacacaagccgatctccacacctccgggttcatccctcctctccgacatcgaaaacgcctcgtttcggtcaatggacgcaatctcactgttacatggttttccccacccgaaatctgacccgtatagcccaaactggttcgaaccggcaatggatc

SEQ ID NO: 485 - DNA, 55739 bp, Arabidopsis thaliana
gaagataaaatttttaaacagaaacaattaagaaaagaaaaacgttttagggccagcaagcttaaaaccttttcaacgaaaccctaaataagccaaaaattctcttctttgatttaattaggattagggttttaaatttttttaacgaacgcgggccggccctagatgttaattaagcccggaaatgtgtttaaaaacgaaataacaagtatttatgccatttatcaagtgatattaattggttaaacctcaaagaaattaataaccacgttgaggagtggtgagaagtggaaagatccaaaaacattaaagccacaaacaccaataaattaaaatcttaaacgaaataattggtacgttacgaagtggaaaagatccacctcactaatctatataaacaaatgcaaacaaacaaaattatcacagatttgaaacttattaatatttcaaaaaaacaaaaaatggatcccaacaaagctgaaattagtcgtcttgaggtacttcctcaagatctactcggagaaatagttgccaaaataggggcaaaatacgctgaagattatcacaattgcatcctttcatgcaaagaactaggtgcatcagcaaacgatgaacgcgtgctcaaaacccttaatcttgctccgttggtgaagaaaccgttatcatgccgcaaacaccttcttattatgaagaaatgtcttgccaacaacaacccggatgctcactacataaaaggtataatatggtactttaaccttgatcattgtgacgttggtctccaccatattggcatagcagctaactgaggccagaaagaagcaatctacatgtatgccatgctattattatgtagaagaaggactgaagagggaaaaacctatatgagccaacttgaatgggctaaagacaccaccatggctgaaacgtgttggaaacaaatcaaaacttcactaaatgagattagagtggcgagaaaaagatgctacatgatatcacttcgcaacatgaaaccccccgacgtgtgccatccaagagatttggacaacacatgtgagaaatgttttttctacaaacaaatgtttaagtttatttttatggtataacttaaacaaaacatctagagagttggaaactgtttttaaaaaattccgtataatgtttgaggcagtgaactatcacaaagactcaaaacaatgttattactcttatttcttttgctttaatgtgtgtctttccttgctgttgtaaggaaatttatattttcaataaaatccaacttttaattaattatctaagcatatcgtactttcaatgttaatattgttataatccaactctttttggctaattcgcgaagaaatgttgaaaagtgaaatcttcccaaaaccaaagagtagtttctaagattttaacagagacacaaagagaaaaaacaaatgggcgggttcatattgggccaaaattaacaatggcaacgatatgtaaaataacttcgtcgttagtctctgttcttcgcgatcctttgcagcaaccgcttagtgcgagagagagagaaagagatttccattgtatttttaatttaaaataaaatatataaaaacaagaccaatgtaacaaatgcattgcttagatatatataactctaaaaaatattcttacaagatagtaagtttggtttattgtcctataaattctagcatataactggtaacaacatgaaaaaaatataaaactatacatagattacaaaaatgtagaaatcaaaagataagattagcaaataacaaagatattccccttttaatcaaagatcagtaaaaaaattcgaagttataattacatactaacaaaaccaaaaacaaaccaccccgcgcaacgcgcgggtctcctccctagtaatgtataataatggggtcataggaaacattcctacccctatacactatctgaaaatcttctcaatctctcattatatttttcgttttataaggggagaggagcacattctttttatcatattggtctcaatatcaggtatgaacaaggagtcaagatctatgaatactaaccgtttgaagaggtaaaaagaagagtagtgagattagctccagcctaggatatccttaagtctgttggtttgccatctagattttccaatagttggattgactcaaacctgcagcactcatcaatcaggcaataatcaagagaaatatagatcatgatttctaactaaactaaagaaaacgtttttttttttttttttttttttttaagaaggaaaatgactcaataaactcaaaaacgaaaaatgataagaaccaaaaatcaaagcataattagtaagaacctcctccagacttaaacgacactgtccccagtggcaatcaaatctagagaaaacgagaaaaataaatcaaaaataaaagaaaataaaagagagggaaaataaaaatcaaacctgtgggttgcctcccactaagcgcttgttttgagtcaatagcttgacttggcggagttcagggtgtgggtggagtgatggaggattgatgctgcctcctcgccttcgaaggcggtgtgtaaacggatctggttagagcagctgtaggtgttgatcgacacttagtggtgtgtcgatcaacactcgtctcgtcacctgcaagaacaagaggagaaacaagctttcgaagaactctatgcttgttatccagtgaagcagacttcaaagaatccaaagaattaatcgaaggtatggcaggagaagagatagaagagaacttatcacagaggtcctcaagtggtgtgggctgaacagaatgtgcagaatcatctgtctgtgaaacccgagggtgtcgatcgacaggagtagtggtgttgatcgacaccgttgctctgcaactctcattggtgagctgagtggatgggagcgttgtgtgtagctctgttttgggatcccgagtagtctaaagaggggtgtttgtgctggaggcaatgttgctgatgggcttagtaagctctgaaccatccatgccaaactccatctccaaatcacaaacctttagagagatcctacctctcttcacatcaaacctagcaccagctgtagctaggaacgctcttctaaggataagaggatccttgggttccttctcatagtcccgtaccacgaaaccagcagggattatgcagttatcaaccttaacaggaacatctttaaggattctttgagggatacgtctagaacgatctgcaaagaggagagtgatgcgagtcggcctatagtgagtcatgcctagtctctcagcaacagacttgggcatgaggttgatagttgatcccaaatcacacaaagagcggttgaacctgcttgtggagatagagcaatcaagaacaaagctacctggatctggaagcttctcagtggtctgatctggagtgattgtgcggatgtactcaacaatgtccactctctgtgccttctctttcttgaccttaggcagcatgattgcactgatgtccctggtcaatagcttagcttcatctgagcgaataccattgttaacaagtcgcttgatatacctgttgagtggagtagaagatgtctcagatgcatctttaggaagaaaatggaggatcttctccattatggttgtgcactaagcagcatgaatctcctgcttagaatgacgcttcctcggataagtgacaggaggagtgtaaatagactcgggctgcattgggatttgcacctaacaaggtgcagtccggatccagtgtcgatcgacactagatgggtatcgatcggcacctttgtattggcttgtctcagagaagagcgtcccgtagggtgtcgatcgacacctcctctacaactacgagctccagctggtcttcagggtccaattcttcccacacatcatctccttctcttatcaagatggcattgcagctcttccttgggttagcatcacgattaccaggaagaaagccatcttgtctcttgattaattgtgtagtttgagctacctgtacatccagcttcttcaagtgaaagctcagacagcatcaaacttgtcattaaactacacaacgagctttgtttggctctctagaatctgctcaagcatagattccattcttgtctttgatgagggtggaggggggagggcttggtaagctgaattgccataggtcctctgaaagttgctctgaggaaaagttttctggaaagccggcttgggagtgtagttgggggaactctggttccctgtaaacctgttgccattgaagttgccttgtggctgcccaaacttcttgtagccctgaccatcgatgtagaaaactccttcttctgactcaggctcaggctcaatagtcgctttctcagctgcaaagtggacatgcttctttcctgtaagcaagttgtgaaccgaatccagcttagcattcacctctgccatttgattgcctgaaatagttccaacaatcttcttcctctcaaagtcagcattcttggtactgttgctactagcgaggttctctatcagagctgtagcatcagctgggtaacgtgtattgaagttaccatcgctcgctccatcaagagccatctggtatctccaatcaactcctctgaaaaaggtacctagaagttgtatttcactgaaaccatgatgtggacagtcccgttgatactccttgaaacgaaccaaagcagccttgaaagctgcagttggactttgtgtgaaggtagacaacttgtttttcaactcctcagatttagcatcatcatagaaattgttcaagaaggctatctcgatgcttctccaagtcttgagggaacctgctttaagttgtttcaaccaagaagcggcttccccagcaagtgaataagggaagaggttgcacagtaggtagtcctctgagactccattagctttgatgctcagaacaaggtccttaaagcgctcgatatggtccattggctgctcatgagataagccatggcaaggatgctggctaactaaagcgaagtagccaggcttcagctcataatcgttcctctggaagggtgggggtacgatcgctgatcgattagcatagaacaggttaggcctgttgaaatccccgagagtacgacgtgattcagcaattggaggaatagctgtagaaatctagggttggtgtcgatcgatacctctgttgtgtcgttcgacactaatcatgtcttcattctgctctcgaaggtgtcgatcgacacccctgttgtatcgatcgacagcgagccctgctgcgtatctggcagctaattgcgcattgagacgcgcttgatcctcattggcgtcctcgggtaggatgagtctatgatcatccaatctttgaccagcctcattgtaggcttgcccatcctcatctcttaaaactccttctgcatcagctttgatgactctgtcagccattgttaatctctgagtatttcggttggtgtgttcgagttttcccaagtctcaaacagacaagttgataagctccttctattgtgtgctccttgtttgcctaggccaacacctgaaacacataaaagaagaaaacaagaaacgcgtgaataacaaaataaaagtaaaagctagacgaaatctctaaactaaactcaatgatgattcccaagaacttttgcaacggcgccaaatttgataaggttcaaattaccctagatctactctctcaaataagagatcaattgcagtatttaaggatggaatttacaaagttcttttgttcaaacaatgagttgaatgtcgagattaagctagcgggtgatgattgaaatagtaagaaaacaaagtaagaaaacagcaggttgattgtgttgtaaacgattagaaaaagagttaggaacaaggtattctcaggagactattggttagtagatctaatgaaagttgggttgttatcgaagcattcttaaactcaaaccctaattatggaataactggtggcattccgcgaaactccctatatctatagctaagaataactggagaagccgagaaattattaacctaaatatgcattcttaacgagttcgattgttcaccttagtagataggccgattcttattacatatctataaaccaggctcatcaaataatatatcacactacagatacctatggtgggcatatctattgtctggattcaagatctagttaattactatagatctagcattaaacataattaaagataaagaattctatagataacctagcaagggggcaatctactaaaccatatgaatccctaatgagaaaccctattcctaacaagcagattactcagacatattgattgaagcaaacaacatatttgatataaaagcataaacacggtaaatagaataagggaaaaaatagatcttttcactgtattaagaactggaatgagtccctgaagaacaggggatgaatagcttatctctctcacaatatggttttgcaaaaagcttgataagaacttgataatcgaaactagggtctaaaataatgttaataaaccctatataacatccaaggactaataatgcaaatagggaaatcttctggggcaaatttcttcttctgtaaatttccttttctttagcttttgctccaaaatgtctcattatctccactgttgtcccactacatagagtacctgaaaagacattaaaaagacctcgagaaataacataaagactcaaaattctatacctaaaacataaataaaatcattaaaaatagggatatatcaaggatgatggagcagttgcagagaattggcaccaggtatttttctggtggtactagtcctgaggaggccgacagttggcggtcgcgggttgagcggaacttcggttcgagcagatgcccggtggagtatcgtgtggatttggcaatgcattttctagagggggatgcacatttgtggtgggggagtgtcattaccatgaggaggcagacggaaatgtcttgggcagattttgtggctgagtttaatgccacgtactttcagcaggaggcgctcgactgtatggaggcgcgttttcttgagttgacacaggttgagcagtcggtacggaagtatgaacgagagtttaaccaaactcttggtgtatgcgggtcggggcttggaggatgaccatgcccagttgaggaggttcatgaggggacttcgaccggatctgagggtgcagtgtaaagtgttgtagtaagccatgaaggcgacactggtggagacggctgctgagatagaggaggaccttcagaggcaagtggtggcagtgagtccagcggtacagccgaagaagactcagcatgtggcacctagcaagggcggcaagcgtgtgcaggggcagaagaggaggtgggatcatccttccagagctgaacagggtagtcgtacgagatgtttttcttgtgggagccttgcccacaaagtagcggattgcacgcagcgagctgagacgagggagtgctaccattgcagggagaggggacatctctggctgcattgtcctaagctatagcggatggcagtggcagtagtacagccggcggtccagcagggagcgcaggtggagcagttaccacatattgcagcggcaccgcaggactacactacacgtgagacaagaggtaccagcaacaaagcgatcactggtatgatttctgagactcagactttgtgaattatttctattgttttggatatcattgttttgtgatgaatgttaggtttcttagcacatgagggagtgagacctacctcagggagtctcgtcatctcactagtgcaggcagaaaagatgatcaagaaggcctgcgagggttacctggtgacaataaatatgtcggagtctgtggggcaggtagcagtgagcgacattcaagttgtttaggagttcgaggatgtgtttcaatcattgcagggattaccaccatcacgatctgatcctttcacgaatgagttggaaccagggacatcgcccttgtctaaggcaccctactggatggctctagcagagatggcagagctgaagaagcagctagaggatttgttgagtaagggattcattcgtcctagtacttctattcggggatcaccggtgttacttgtgaaaaaataggacgagagtttccgcttatgtattaactaccgggggttgaaccgggtcactttgaagaacaagtacccattgccaaggatcgatgagttgttggatcagttgaagggtgctacttgtttcttaaaaattgatttgacgtcgggttatcaccacatcctgatagcggaggcagatgtttgcaagactgctttcaggacgagatatggacattttgagtttgtggtgatgcctttcggttgagtaatgaacctacagcgttcatgagtttgatgaacaacatgttcgaggagtttctggatgagtttatgatcatctttattgatgacatcctaagttagagatcatctttattgatgacatccttgtgtattcttagagtcctgaggagcacgagtaataagtgtgcattttacatgttttgagcatccatttgtcatccctttagcatcatatcatcactgttttatatcatttctcatcattagtcatcactttgcatgtttaagatagttttgcatgcatgttgcatatttgtgttgttttcaggtgatttggacctcttggcgagccaattggaagaagcggacctgatcacagcagaacactcgacccactggtcgagtagatggctccactccttcaacaaccactcgaccccctggtcgagtagaaggcctcatcactccacatcaccactcgaccacatggtcgagtaccaccaagacaaccactcaatctcatcaccgtggtcgagtatcatcacctccaccacatcaccatcactcgatcactctaccaccaagccgagtaccacaatcctcatcactcgactcatactcgattgctagcttaagagtcttttccattccgcactcaactagagactcgagcacaaggaagaaaagaagactccatgtaacacccgccccgccatttagactaagacaacatgttattcatctgatcttgtcaaaaactttttttttaaacttcacacacgaacaaaatattgtacacaactcctcacgcttactaatcagagacaaaaggggaaaagggggtaaataaagaatactcagtgaggggaatcaactctgcccactaaaacatagaacaatttctaaagctatacaaccatcttcataacatataaacttagacacaagcaatcaaccttacatgctttaacttctaataacaaattcataacgatcattttattcataatagcacatatatacgtatatatatatctttaggtccattcatcctcgtgacaactagaacctcatgagtggaggttggccctcgtggctcagacactcccatgcatatcgggctcgtcagcctttcttgaccagcatgtaacccgtcggcccatcattgtccacattactagggagaccacggcccatagctcgtttctccctagtcttttatacaaacatacataatcatcatatttacatacttatacttaacattctcatacataatatatcatagtcaaacatcattatcatacatatccatcaataatcatcacgtcatattatcacgtaatcttatcctatgcaatcagatctaaggctacatatcatgcgtcaagaagcataacaaaagaaaatgataacatgcttcgcaaataccaccctcaccttagcctaatgaagatgaagaacatctctattctcctttctctccttttaggccaacttagtataagagctttaactgcatactcttgagctccaccttggttctccatcaaccaaaaccttactccataaggctcctgcaaattcacagctcaaaccgaacccgattcccattcaaacaataaaaacttgtcatggtttactccatacaaaactgtctcagaaacatatgcataagtcagtaacgaaccgttagaaacgtgatccaccgttgaatatgtagatagtagtaccatgaacgtctgcacaaagttgcatccagatcagaatagtttcggacctccaaacgttgccgtcaacgagctccctcgggttgtcttttagggttttctgggtttgacatactttgcaattacttgaccagaaagaaacgtgcataacttcttgcgtttaaatctgattgcagatctgtcagttgatgtggattcttgggagcgtgttctttccatagacaccttattcctgatctgagtccctctggtctgtcgggaattcaccctacaataaaccttcttgaaattgttcttcctctttcctcttttctcttcttcttctttctttgctttgcccactctccgattttactaagatctgcttcatctcacttctccttaatgacatgaaccagatctctttttctccatgttcctccattgcggtggtaacgatctgttctcatccgaagcgtctcgccttcttcactaatccgtttacttctctttgatcatctttctctttctcctcaaggcaattcagtccctcttaaatcaaattctctttctttgatggtgtttaatctctctctctctcatctctcgacgaagacgacacgttgacatgacacaacggtgtcacaattagcctcgactttctccaccaccacccatgagctctttcccttctctttgatccaataaataaaactcaccatgacctcgtctgtttggtaactcggagacggttgctccgatcccactattatgccttagggtttctcaatgttgtctttatttttccttcttgataacaaatcaaagacgacgatatgcgtatatttataaatggatgcttttggactttaaatgggcttcctcatatttccaaaacaaatagcgcattaaatgtgggagtggggtgttacaatcttccccatttaaatgaaattcgtcctcgaatttttggcggtgatttatttccatataaacctcttacttgtagctctagtaacgccacatccacatttgcggtatacaagcagacgacccttcattaaaacttccagtttaccgtttttaaaaatcgacacttgctttctaacgttgttaactcttttgatgcgcaactcttgtagcttagaaaactttgaacttttcaaacactgaactctagtgcacaaataaacatctgctctagcaccatattaacaaaagatgaaaatctcttttaccttgacatggcttctcatattcctaaatatgcttattgaaatggagttccatcccattctttttttttccacggtttctagggctccttccccgtcctcgttaatttaacatctttacatatccatgacttagacggtttccatccgtcttaccataaatgtctctgcactctaattctctcataatactttgttccatttcctttctcgagaaacttatcctttagcatttcattgctatactggtacattgatccttacttgacacttcttaacgccatactaaagcaaagaaaacatgagaatccaaattatatttccagtatcacaagaaatgtaattaagtcttccaaaaaagaaactaagcaaatatggaaattcacttaatcaaataaacattttaattcaatcaaagcaatcagtcatagatcaagcaaaacatttaatcaattattcaatttttttttttttgataaaatctttttcataaaatggttttaagaaatctgaccctcctggtcggaaccggagtggcctttaccagctttgataccaaatgtaacacccgccccgccatgtagactaagacggcatgttattcatctgatcttgccaaaaacgttttctttaaacttcacacacgaacaaaatattgcacacaactcctcacgcttactaacttgagaaaaaaggggaaaaagggggtgagtaaagaatactcagtgagaggaatcaactctgcccactgaaacatagaacaatttctaaagctatacaaccatcttcataacatataaacttagacacaagcaatcaacctaacatgctttaacttctaataactcattcataacaatcatcttatccataatagcacatacatacgtatatatatatctttaggtctagtcatcctcgtgacaactagaacctcatgagtggaggttgaccctcgtagctcagacactcccatgcatatcgggctcgtcagcctttcttgaccagcatgtaacccgttggcccatcactgtccacattactagggagaccacggcccatagctcgattctccctagtcttttatacaaacatacataatcatcatatttacatacttatacttaacattctcatacataatatatcatagtcaaacatcattatcatacatatccatcaataatcatcacgtcatattatcacgtaatcttatcctatgcaatcagatctaaggctacatatcatgcgtcaagaagcataacaaaagaaaatgataccatgcttcgcaaatactgttgataccggatcccgcaaactggatctcttgagtatttcgaaggcccatcagttttcaagcccaagaaggaccatattgcacaaaggaggtggtcaaatcttgacattaatttgtagtttaattcatgaattaatgactatggtcaaaggaataaaattgtcattcaagtttagaattgattgtggaagttattttgtgaattaattttataattaatagccaaataatggcacattggaagaaggaaagagactataaaagagaggtgaagactccaagaaaagggggctagagattctatattttcaccacaaatcttaatattaaagggagatttgcaaaactgcccttattctaataaccttttgtaaaagtgccctttcctgaaggccattttaaaaactaccccttctaatatgtcaaatgactgtcttaccctctggatgattaggtttcacgttcgtttcacaaacttcttcgttttggcacaaacttcttcgttttcctctccgattttcctctccgatttcactcaaaatcgccggcgaatttcctctccgatttcactcaaaatcgccgacgaattttctttctgagaaaccccaaaatcgccgacgaatttcctctccgataaacctgttcttcgctgaaggattcagatcatttctctacgacgcaaacaatccccagagatatcgatagatccgacggtaatcgtttttataatcgattttatagtcgattttatagtcaattttatagtagatctgacgctatttcataacatgttttgcagatggattcagagagtgaaatccttacattgcctgaacaaatctacagagaaggtgaggaatctattgcactgggaaccgttcaacaatactcggattggaatttagttagtaaagtagaggaagatttaggcgagtgtttatttcagaagattagaagttcgtttcttggtcctctagttgaattgggaccaaaaatgaaggctaagaagggaatcagattttctggaaaaatctttcactatctcatgcagtagagagtgaaaacaaaaggatcaactctttggtttagagttgattctcaacctatccgtttctccttgagagagttctatctcacaacaggtaataaagttttacaatcgtttttaaagcttaattaactgtcgtagaatgatttacaaggcatttgcataactgtttgtgtagtttacaatcgtttttaaaacataagtaagtgtcatagataatttacaagggattttaaaagcttttaaaaggggtttacttcattaacaatcgtttaagaagcataagttagtggcagataatgatttacaagggattttaaaaagggtatgcatggtttacaaccgtttttaggcataagtaactagcatagaataatttacaagggattttaaaagcttaaagaagtgttaaacacgtttacaagggattttaaaagcataagtaagtgtcttaaaacgatttacaagggattttagaagtgtttgcatagtttacaatcgattttaaaacataagtaagtgacatagaatatttacaagggattttaaaaccttttctaagggttaaacatgattagcaatcgttttttaagcataagtaagttgaatagaatgatttacaagagattttaaaagcttttagaagggttaaacatgatttacaatcgtttttaaagcataagtaagtgtcatataatgatttacaagggattttaaaagtgtctgcatggtttacaatcgtttttaaaccataagttagtggcattgaatgatttataagggattttaaaagcttttaaaagtgttaaacatgatttacaatcgtttttaaagtatttactataaaacctgtaataatagtctctacactgtcttttgttcatacaggaattcaatgtgaacctgttcatagggaacttcgacgaaaggggaaagatcctgtaaaagaaccatacttttgggctagtaaaggatcctatactcttggtgatctcgaagatcgattgtttttaaaacctaaggaaggtgaacctgctgttgaagatgaagaaaagttgtgtcttgctgcagtagtgttgactgaaggaattcttttgacaccatatggaaaagagaagatacctttgccaagattgcagcatgcttctgattttgagacgtacacagcccaaccgtggggtaaagaagcattcagtgttctatcaaattcaattctgagaatggacgagaaaacttgggcaaaagagaaatatgatttgagaggatttggactagcgctaacaatgtactcttttttttcgcaggctgaagaagaaggaggactagaaagaaaagcagaggtaattgaaaatctttacaagctattttaaaggtctactaactatattaatgattgacttattgtttttattttgttacagaatgacaatgaatcatttgaagattcaatccgagagccaaacacacaatatgggagctatccgggtgatgatgaaaacacccaacgtgatgttggtgatgaattagttgaagaatcatcaaaagtacagtaatttatatctctaaaagtcttacaaaaatgattagtatcctttaaataattttacattctgttatcttttcaaggataagtctcctactccacgatcctctacaccaaatttcaatattttgtctgaagaaagtctggatgttcaaaaggataagaagagagttagcagaggaagaaatgaggttagcatttaaaaaaatttgtattatctaaccaagggtttataatatttttttcaaatctttaaaagtttatcttttatgcaacttcagaacaagagagttaaaccaagtgttcatgctgaggataatcttaaaacaagaaaacaggttaatatttgcaacagtgctgtttttaaaaattgtcaattgtcttgttatgatatttacaagggattttaaaaatacttttaattggtgttttttactactctaggtgccgacaaagaggcagaaacaagttgatagtgctgatgttgatgttccaacaaggaaagaggttagtatctaatttattatgattttgaaaattttgtttacaaggtattttaaacatctattttttttattatttttgataggcacagagtaagaaaaggaaaattattggcaatgatggtgataacgctgataatgatggcgacaatgatgattttcagcccgctccgcaaagaaagagtaagcggggtacggttccttccattcatacccaagcacctttcacagctgagaagaagaagcatccaattttgcatccatttgcgaaagttgatgccacaagacttgagaaattggctgaatggaagaagtcaaggaaaaacaagtgagttttgttagtaagatagtgagttttttttaataatggaagaagcatcattgttgactgttttgttgttgtaggccactatcaatcgcgggaaatattgtagatacaaagtggtttacaaccctagagacgccaggaaaagcaatcacagcaacggtatgcctaaaaatccttgtaaaattggtaacccatgaattacatatagtttttaaagcatcattaagttatttacaaaagagattttaaaaagggttacgtggtttataaacaattttaaaagattagaaagtggtaaagaatgatttacaaggtattttaaaaaggatttacatgacttgcaatcgtttttaacggattagaaagtggtaaggattgatttacaagggattttaaaagctattaaaaagggtttaattgattaacaatcgttttagaagcagaacttagtggcatagaatgatttacaagggattttaaaagcttttaaaagtgtttaacttgatttacaatcgttaaaaagcataagtatgtggcgtagaatgatttacaaggtattttaaaaagggtttgcattttttacaatcgtttttaaaggggttttctaatatgataatttttatttttgttgtgtttagcatgttgatgcagctttggagttgatgaaaacgaggaaggaaagcaatccagaattattcaaaaacaaatcagttgtatttgttggatcgtctttcttaaatgtgattgatgagtcatacatggagtttttggataacaaagagggatttcagtttcagtctgaagaaatcattaagctgataatagaggaagaaaccaagtgcatattggctcctttctgtatcaaaggaaaatgctgggttgccttgctcatccacttgaacagaagacagtttgtatatgggaatgtgcagcttcttatttaacagaagaagtcaagaaaaaatatgttgctgcctactctatagctatgccatacattgttcggaacatcctcaaaaaaaaagacatggatggctctccatttagcatcaaagtcctgaccacttttcctcaggtaacttctttaaatatatcatagtcttagaaatgaatattccgtaagtcctgacttctataacttctttgcttaagtaattcttttggtttttggttgtaggctcctagaaatgaagagtctggtatctatatgctgaagtttatggaatgctactcaatgtataccagccattcaaaccttgaagggaacataattcaaaacgttaggaataaattggctgctgacatcttcaccgaattagggtcagtcactttgtagaagtagcagacttctaatcaaaaagtagtggagtataagatagatttatcagcttttgtttcttatttcataaaactttgtcatttgaatattttatgaacatctgtatggaacaagatttatgaagtttatttagttcaactcctgttttacaaaattattgtataatggttgtttgggttaacaggtgctttgatttgaatggaaaaggactttaaacatgcttttaaacagggtttttaaacgatttacaagctgctttataaggattttaaaagtgttgaaaaagctgcaatagcggttattatgaaaaaaatttacaatcgtttttaaaatgatttacaaccgtttttaaaagagatttacaaacgatttataagctgttttaaaagcgttttaaaagtgttgaaaaagctgcagtaactgttattatgaaaagatttacaaccgtttttaaaatgatttacaaccgtttttaaatgagaatttcaaccgttgaaaaagttatagtaatgttaaatactgtatctgttactaattgggcctaggcctgttatttagaaaaacaaactgttttagtttaaaaaaaactaaaagcccaaaaaacattaaagcccaaaaattcactataacctaaaaacaaattaaacagggattggctgctgacatcttcaccgaattagggtcagtcactttgaaaagatttacaaccgtttttgaaatgatttacaaccgtttttaaaagagaatatcaaccgttgaaaaagttacagtaatgttaaacactgtatctgttactaattgggtctaggcctattatttagaaaaacaaactgttttagtaaaaaaacactaaaagcccaaaaaacactaaagtccaaaaattcactataacccaaaaacaaacatggaagggaaccgtgaaaagacaacaaaaaagtaacaaaaaaaaagaaaaaaagaatacaaactgtcgtcttcgtcttcttcctttcaacaatctgaagaaaatctgatcatccagcaaaaaggaagcaattgaaggtaactaatttacgaaactgaagtttaacatttgggtttgttcgatttttgccgaatctcttttttgatctagcatttctaggtttttcggttgaaaacgaaacaagtaaaatagattgatacttgggattttgaaggagtgttgaaaattgttatataattttgatagatttatgttttaaattttgatatttgggtttcaaaaaccttcaaagaagatttcaaatgccgattaacttctctgttgtagcaatttcaaagttttttcgttttgaaactttaaaagtaaatagattgttgtttgggtttgtgttttaatttatagatcctcacttaatttatgggttaccagttgattggagttggtttggaaaagggttttttgtttctattttcagcggttgtgttctttgaaaaggattaaaattttgtttttggaatggtttcaaaacggtctttaaaaaggattatggagtaatgactatgttttacaagggtttttaaagtcttaaaacgacttgtaatgactttgaaaaatggttttacaagggtttttaaagttctttaaacgacttgtaatgactatgtttatgtttcgaaaactacaaatgcataatagatttacaaaaatggtttttaaaaccatttcaaaaaactgtgttaatttaatgactgtgttaatgtatttaatcaggttttgagaaatatgagtacaaagaaactgttcttccctaaaagactgttccaaccaggcagcgaagtagataatattacaagggtatcaaagcattcatccttcaaaattgtctcgactgtcaggaaagctttagagccgatagagttcaacacattaatggacacattcttgggtcctatagtggaattcgctgaaatggacttagcattttcaagccatatcgttcatcatttactccagagaagaatactaaccaacaatgacgaattgtggtttgtatttgctgatcagcctatgcgattctccctgagagagtttatcataacaacaggacttccaatggatgatgcatcaggaagcagtccaaatgtgaagagaaagaagaaagaaaagtggtggataaaagataatcagactttgaagggaaagcagaaaaaagatgtgtggattaacaaggaaatgacttttttagatcttacatatgttttggaaaagcgttccaaaaaaatgcagccagaggagagactgagattggtgggttcgttactagtggagggcatattgctagctcgaaatccgactaccatgctgccaattgagaatctgaagagagctactgatttcgaaaagttctgtaagtatccatgggcgcagattgtgtactcatatttggtaactgaagtgaagagaatcggtaatgactatttgttaaggaaacaatatggtctatttggatttgttcaatcaattcagatatgggcattatcatcggttcagaagttgggagaaaagtttggcactagagatgaatcatctagtggaaatattccattaattctccaatggagatcaacatcgtctccaagtgcaaaagctataacaatgatagcagatggtgacaaggtacattttcttagctgtggctttttttatgttttaaacactttttataaataaagagtatgttttacaatagtttttacaatcaagttttaaagatttacaaagggttaaaagcaatttaaactatttacaacggattttaaaaggttaattaaggatctgttggatgtttttgatcttgtgatcaaaggatatagaatgagcaagaaggattggtgtcagggatggattcaagtggaacaaggacatcaaggaagaattgatcatgtcttgaaacctgcaattgaaacagttgtgcatcaaagcagaaaaaggaaatcaatgtcctttggtgagaaggtaaaactggtatatgaaaattgtgaggttcttaagaagaaagttggaaggctggagggctatttaggcatcgaaagagttcctgccagttatactagagaagaacaaaaagaagaggacgaaaaaaggagcaagaagaagaaaagcaagaggaagaaggaaaagaagaggaattagaaaaggtatgtgtttttacaagagattttaaaagcttataaatcgtgttttaaagatttttagccgtttttaaaagataggcagtgttagatatgtttttacaagggattttaaagacatcttaatggggttttaaagatttaaattcgttttaaaggataggcagtgttcgataagtatttacaacggattttaaaagctttttaaaaagtgatttacatgagtaacttgtagttataaaacttgtaattttatatacaggttgaatacagaggcgacgaagggacagaaaaacaagaaatccccaaacaaggcgatgaagaaatggaaggggaagaagaaaagcaagaggaagaaggaaaagaagaggaagaagaaaaggtatgtttttttacaagggattttaaagacttcttaatggggttttaaaagattgaaattcgtttttaaaggataggcagtgttcgataagattttacaacggattttaaaagctttttaaaagtgatttacatgagtaacttgtagttataaaacttgtaattttatatacaggttgaatacagaggcgacgaagggacagaaaaacaagaaatccccaaacaaggcaatgaagaaatggaagtggaagaagaaaagcaagaggaagaaggaaaagaagaggaacaagaaaaggtatgtgtttttacaagggattttaaaagcttataaatcgtgttttaaagatttttagccgttttaaaaagataagcagtgttagatatgtatttacaagggatttgaaagacttcttaatggggttttaaaagattgaaattcatttttaaagggtaggcagtgttcgataagattttacaacggattttaaaagcttttttaaagtgatttacatgactaataactgtgtcctggcttgtatttgggaacttgtaattatttatacaggttgaatacagagatcatcattctacttgcaatgttgaagaaacagaaaaacaagagaatcccaaacaaggcgatgaagaaatggaaagagaagaaggaaaagaagaaaaagtagaaaaacatgatgaatataatgatgctgcagatcaagaagcgtatataaatttgtcagatgatgaagataatgatactgcacccacagagaaagaatcacaacaaaaaaaagaagaaacaaatgtctgctttccttaactttttaaaaagacatgataaaattgtcaaaaaataaaaattttgttttgatgttttggtttacaggttttaaaagaagaaaacgtagaagaacatgatgaacatgatgagactgaagatcaagaagcatatgtaattttgtcagatgatgaagataatgggactgcacccacagagaaagaatcacaacctcaaaaagaagaaacaacagaggtctgcattccttaattgtttaaaaagacatgataaaattgtcaaaaaataaaaatttgttttgatgtttcggtttacaggttccaaaagaagaaaacgtagaagaacatgatgaacatgatgagactgaagatcaagaagcatatgtaattttgtcagatgatgaagataatgggactgcacccacagagaaagaatcacaacctcaaaaagaagaaacaacagaggtctgcattccttaattgtttaaaaagacatgataaaattgttaaaaaataaaaatttgttttgatgtttttgtttacaggttccaagagagaccaagaaagatgatgaagatgttaatcaaacaccactctttatgcaagaagaagaaatcacccaaggacagagcagtcgtaagttccttttacattcacagatgatttgccttgataaacaacttctaaatatttttgtttttgtttttgtatcagttcaaactcctttgacgccggtcatgttgagtcaggaagtaatggaagaaattgacctaagagttaaaaaatgggcgaaaaacaaattaataagagatctattatcgtcacttgaagaagtaagttaaattacatcattgttttgctgcaaaagattttaattctaatcattttggaatttatacatttcagattctttggcccgacagtaaatggcaaaaagtcgaaatttgggatatgtgggacgagaagaaatacaaattagcattaaagaaagcaacgttactcattcatcctgacaaactgcttcgagctcatccagaagtgaaatacctagttgaacaaatctgcaagataataatggttagtgttaaactcttcttttgtataacgatatatctttaaaaacttgaatattattgttatgcaaaaaataacttacaggttgaattttatttgcaggtagagaaagacagagctactaaggcaaaaatggatttagttctttagactgacttattttaaacatgtttattttacttttgttatttggaatctatgattgtacttgtattttaattatgactgtcaaatctaatcaaaatgctttactattgtcaactgtttatggttttataagaattgtcatgatttacaagtgattttaaaggcataaacagcttacatggtttgctatcggtttttaaggataataaagtggtaaagcatgatttacaagggattttaaaagcttttaaaaggggtttacttgattaacattcgtttaagaagaaaaagttaatgtcagaaaatgatttataagggattttaaaagcttgtaaaagtgtttaacttgattcacaattgttaaaagtatatgtaagtggcataacgaaatatttacaaggtattttaaaaggattttcaaagacgttttaaacacgcttttacaaaatatgttaaaaaggtaaattattggaattactattaaaattacttgtaaagtttgatagtaattttagaaaacgacttagaagacattttaaaagattcaagttaaaagcttgtaaaagtgtttaacttgatttacaatcgtttaaagtatatgtaagtggcataacgaaagatttacaaggtattttaaaaggatttaaacagacgttttaaacaggattttacaagagattttaaaaggtaaaatattggaataaccttcaaaattacttgtaaaagtttgatagtaattttaacaaacgagagtaatgacacgacacaatgaagaaaatattaaaaacccaacaatattcaattctttggagataaagatatatctaaattgcagcaacacaagttgatttgttgtgacccgactgaccacacctactgcatttgtgtaattttggttttggctgagaccgtccatgctcccaaacagaaggaatcctctttttcttccgtctgccactaggtacacgagtagaaggtgggagacaaataacttcactaatagtttctggaatctcccaatattccatatcaccatttgggtgaatgctctctaaatatgcttgacgccacctgtaaattacagcgatgtaaactgagattaaaaccacataaacacagataaaaccataaaaagagatattaaaacattgaaaaacgcctgtaaagttgtgaagaatagagataaaacctgtaagtagaatgaaactcatcaacaaacatgttttcgttcagattgatatgtttagcagaagcaattccatgtgtgcaaggaaatttatcaatatcaaacatacagcatgtgcaagtccttttgtccagattaaccaaatgcgttttggtatctccttttacctcaaactctttttgattaacttgacaaacctcaagccatcgtgttgaagtatcatatgacgctttcattttcttccctacatttatagtaacagcagacggatgttgactactctcttcacgtcgctcattaaaccatcttgtcataatagatctgattgactcaaataggcaaacaatcggatactcgcggttctgtttcaacaaggcattaacagattcagctagattagatgtcatgatgttgtaccgatttgaaggagaataagctcgagaccatttcctaacatctacctcccaaagatattgtgctaactttttatcactattagtgatttccgagaacaaagaatcaaattctgtcttcgtgtaaactctagaagccgcatagtaaactggaataagtgaagaacctctataatgggtttccaagtttttttgcaaatgaaaagtgcaaagtccatgatgagcaagtggataattccctgaaagtccgcttgcaatagaagcagctcggtcagacacaaaaactaaatcattctcatcagggattatattcagcaaacacttcaaaaaccagtcccatgacgcgtcattttcagagtcaactattgcaaaagcaataggatacaaattaaaattcccatcatgagctgaggcaccaagcaaagtccctttaaactttgatgtcagatgggcaccatcaatagatatgacttttctcatcaacttataacctctaattgatgcaccaaaagccagaaacgcatacttaaacttattagcagaatcttttttgaaaaaagtgatagaacctggattcgtcacttgtaccctatggaaccacctcggtaaaacctcaaaactatcatcaggtaaacccctcgcaagttctgctgcatgttcttgaactctccaagccttcgaataattgattccaactccatgatcttttctaaatatttctatcagctgtttaggtctgaggggaagctttcctccttcaaaatggttacttatcaatcttcctaatgtccttgcagatgcttgacgatgactaacattccttaatgaagagtcacaactgtgatgactaacatacttccgaataacataactctcggatccaccagccctagttgcacgtagtctccaactacagttttcatcaatacaatgaagaacatacctcgtgagatctgatttcactatatgaaactcaaagctgtgcttcactaaacatccgcaacgtgaatacaatttcatctttgtctttgaaaaaatttccaataaacaaagaatcagcatcacttagaccagttgaaaacgcagaactagaatactgttgatcaagaatactagatgtttcagatacacacgcctcattaatcctagaggttaacctcggctgccaaaataaaaagcttacctcaaacatcaatctatcttaaataatgattttacaaggatttttaaaaggggtttaaaaacgttaataatgattttacaagattttttaaaaggattattacctgagtagtagatgcagaatgagaaacaaaaggatttgaagtcgtctcagcctgtaataaactcaatcactgacttaataatgattttacaaggatttttaaaaggggtttaaaaacgttaataatgattttacaaggatttttaaaggggtttaaaaacgttaataatgattttacaaggatttttaaaacgattagtacctgagcattagggacagaatgagaaacaaaaggatttgaactagtctcagcctgtaataagcacaatcactgacttaataatgattttacaaggattttttaaattataacacaagaaggttattgaaaaacctgctcaactgtcacagaaatttgctctatagtcaaacataactgaagcaatcctccactctgtgagaatttgtgcataaaagttgcaagctgtctatcgttcctaatataaagaggatgagattgtatggttgtagacgtggagactaacttgtaactaagcttcaaagaattggttgaactatctatttgaaaatcctctacaagaatatcaaccaacgcgtgataggtaatgtgctcatcaatgagcactaaagaagctcccaattcaatgtctaattcaaattcccaagtcatattgtttgtcaacttccacaagccacaaacagaatacaattctagcattataacctgataagataaataacaacaaaatcaacacccacaaaaacactgtcactacagagagaagcaaggtttacaaatcgttttaaagcgtaagtaagtagcatagaataatttacaagggattttaaaagctttgaaaagtggtttacatggtttacaaatcattttaaagcgtaagtaagtagcatatattaatttacaaaagattttaaaagctttgaaaagtggttaacatggtttacaaatcgttttaaagcgtaagtaagtagcatagaataatttacaagggattttaaaagctttgaaaattggttaacatggtttacaaatcgttttaaagcgtaagtagcatagaataatttacaagggattttaaaagctttgaaaagtggttaacatggtttacaaatcgttttaaagcgtaagtggcatagatctatcacgaaagcatatgcaaaagaggtaaacactaaatcagaaccaaaatctattacgaaatagtataacgaattcacataagcaaatctatcacgaaacagtataacgaatttaaaaggattttagaacagtataacgaatgtacaaggattttagaaacaaattcaatcatcaaatctcaaacaaaattcaaatttgaagctgaagcaaatgtcaaactgtcgattgtatcaggattcaaataacgagttcacataatcaacaacaaaaatcgaataaaccaattcgaaaacgaagatttaagctaacattataaaatcaaacctgggaaacgcaagagattcgacggcgacacacagctctacttacgacggcgaaaatgggttttcacggcgagtaaactcattatttccgacggcatgggattcaacggcattcacaatttccgatggaggaagaagagagagagtgaagaaatgaattaggtctgtgggtagctcattaagggtaatttggggagaaaagtattagaaagggtagaaatgaaaatgggaaaaaagggtagagttgcaaaagggcattgagaaaagggcattagagtgaattataatagaataattgctgagaatgccctttgcctactaccctttttcaattctacccttttctatttgccctttttatttctaccctttttaatttttaatgaccattttacccctatttggaaattgttttaggttaacaaaatgaaatattaatactgtttgcataaaataatccaaaataaatttcccgccaaacttttaccgccaaaaattttcgaaaaaaaagttcccgtcaaaaatttccaaaaaaaaatatttcccgcaaaaacttttttttcagaaatatttgtcccgcaaaaaaaaaaatttttggcgggaaatagatttacaaaggattttaaaagggttttaaaagatttacaagcgattttaaaaatgttttaaaatatttacaaggaattttaaagggattttaaaagatttacaagggattttaaaagggttttaaaatatttacaaggaattttaaagggattttaaaagatttataagggactttaaaagggttttataatatttacaagtgattttaaaagggttttaaaacatttataagggattttaaaaggttttaaaatatttacaaaggattttaaagggcttttaaagatttacaaaggtttttaaaagatttttaaatggtttaaaagtatttgaaaagatttacaaaggattttaaagaatttacaagggattcaaacacttttaaaaactcttgtaaattttattaaaaccttttaaaatctcttataaatcttgtaaaccacttttaaaatcccttgtaaatattttaaaacacttttaaaatctcttgtaaatattttaaaacacttttaaaccctttaaaaacctttataaatcttttaaagccctttaaaatcccctctaaatatttttaaacccttttaaaatcccttgtaaatcttataaaacacttttaaaatccgttgtaaatctatttcccgccaaaaaaaattacaaggatttttaaaagcatttttttggctgagaaaatatttttggcgggaataccttgtcacttctctttttcacttctctttttcattagtcataaagaacatgagaaataccttaccaaaaaaacaaaaacttgggagataaagatcctcttataccttgtaacgtctaaagaaaaattgtataaaattaaatacaaatattcaaaaataattataacgatcataactcattcatcatataatacattatatttaaccggccccatattataaatattttgaatatatccgtttatttttaaaaaaaatagtatatttataatttttaactttttgatctattaaatattgatgatgttctttaaaaataacaaataaacataattttaaatgctccaaactaaaatattttaaaagattattgaagtatataaaaatatacatttaaaaaatatataaatattcaaattctgattcattacttagtcggacttttggttaaactaatttatatttaaaagaaatatactactctttttctttttttttgggacgaaagcatgatttcattcaaataaaaaaaaaacaagtacaaggatagaaggacactaagatcccaaagtttaaaatacaacaaagctaggtattccccaatgccacaaagagataagcaaccaaatagatagagtacatcaacaatggttccatgagagatttaagccaaacacttgaaagtaatttggtacaggtgaaatcaaagattgttgacaattcttccacaaacaacacagcggatgaaaggatggtccctgtcagaagacctaatgacgttgagaggtagccaaaagcatggatctcgctggcacgagaagaactacacgaagtaatgttttagcaaggattcgagcaaaattttgggaaatgagggtggagtgtcgaggtttaaagctgagtgctatagtcaccaagaagtagtgttggatcgtaggtacacccagatcgcaatcaaaactttgacaatttggagatgaagaacaaacgccataaaacttcaagcttggtggttcgagtaacatgaacataagggtaactaaagccaggattcttagaagtttaaagcaaagccaaggtaaagattgtgaattgctcctccgatggagtccacgaccattgagtatgtaattacacaaccatcgacaaggttttgacagaaaataagttaggtcatacatgggctaattaaaacgatgaaagagcacacaccttatggatttgggcaacaaaagccttaataggccaaatttggatttagggcccactcagggaaaccctaatcttgcattggggaccagcggtttgagctcatggcggctggtcgggaaattgatggttttacgcagggatcgacctcattggagattgtagatgcagtgggagcacaagaatagcatggtctgatgtatagtcgagcaaacaagaagtcttattagcaccagggaaaatagaaaataccctaagaagagagtcgtcttgcgccgacgacgtctccccttggcgcatctgccgatccaagagggattactcctgccagcaacgaagctcagggtgagagatcttcatggggaataagagatttggctcgagaaggttttggttcagtgaattctagaactaatttttgtaaatcactagtttttgggtgcttctgtttggatgttgcggaactagtctgagggaggaggttcaccggagtctccttccactctttgaaggtcactgaagcatagtcgctgaggagggttgagatcgataagattttaaaggattgcaacaacggagaaaaaaactgaaaaaaacttaagtaataggaaagaaaaggttgagaacagaagtagagcaagctcttggtggtgggatcccaacgcgggcgaccaagagccccgccaccggcgtcgaaaaacttgaaagacagaaactcctcgatagtcgtgcatgggagagtttgtttcacgctttttagtcaactagaaatatactactcaaatctgattttttgacccgtattacatagtagatagaatgttttttttcaaaacaaaactagtaatattttacaaaaggcaaggttaccttttattatgtacttcctaaataatagtatatgatgcaatttggtgatgcaattagttagttgttaattgagcatccatgtgggatgcaacttcaactatgaattttggcattgtctttctcacatgtagacatggtaatgtaactatgtaagttctcgttcattggtatgataaatagactttgtttggacagttatagttccttgaaccagtcctgacctaatatatttttgggctaagaagttttaaattactcgaacaagttttaaattgcataacccaaaaatcagaatataaactcagattttgtagatattttgggtatttttgagtaatctgcatagatttaaatacacatttttgatatttcgatacttcgggtatcttaaatctgaatccgaatccaaaatatccaacctgaatttgacttgaactcaagttttaaaataccagaattgattatagatttgtaaatccgaaatatatgaacctgaaaaattctacccaaatatttgaacgtccacacgtagacaaatttaataattggtcatgaacctatgtaccgtcatagatctgtcttatatgtttgggctggacctgccttgcaactaatgggcaatgtttcgtaggcataactcttaactgttggtaagtaaggattgaatttttttgttgcttgtatctactatctacagtataaactatatagaataaaagaacctcctttttcatttataattctcagcagatacgtgaaaaatattgaaacttcaaaatccgacagtctcatggcatgagcagtttggtacaaatgagcagttctaaaacatgatttgtcgaattttatatgaaaaatacataaatgtttttcattatatattttataagtttttatttctttgtatttctaaatgaacaataaccatatttatttttagtaaaagttaaaatttttacttttttcgaatttttttgacaaaaattatagagaaaacaagaagaatgagaaactgaaaactacaaaaagaccaaaataacaattcacaagcagaaaacatgaagcaaatactagcaaacaaaagcagaaacccatgaagacacaccgattctaaacagaaaaggtcagacagttgcgtggtttcctcaactcgaaggacgtagaatcctcatctttgttgccatgagcaacccaaactcaaagccgtcctcaaacctccagtaggagcacctacaacttttccgaagactaacgcaaaaacaaagcggctatagaaaactaatacccttacccggcgacatgagagcatctacgagcagctagataagctgcctccagccaccaatctttttgcgaatcaacaagaaacatctcccatagatagtgaagccacctagaccaaaccaccacctctattccccatagagaaccccaccagggcaacacgcaaagagatcttcgctgcaaaccaccgtaggctgaaactacaacaacaaataccagcaacacacaagtagtaatcaaagcaagtcacgaaagagccacaacggaaaaacggagccgcaaaaccacccagccatcaaccactaccacaaccgtaatgaacgactaaaaaaaacctcaccgagaactccgacgaggcagttatcaccacaaagggcccaaagagagaagcaaaaccgatctaaatccaaaacctggctgagagaccacatcgaaggcaagaaagagttagattcaaagccgtcctcaaattccatcacctcctctgccatcaagctctccccatgtagaataatccgagctgaatttcttacacgcgagctcttacacaatgccgcaaaaagacgcaaaccaccaaaccaagctcacatatcttatctagacaactcacctaagctatgaccagaacctgagagaataatcaccgctcaaagagaagacgttagccaaagttgtgacactccttgccaccacgccgcatcaaacctcagaacaaccaccttctagagctgcagatcaagacaaagaaccataacaaactcaaagcctaccaaagggggaggaaaagacagctgagaagtaaaaaaaaggagccctctccggcaccggaaacagcataccggagaggcaatacaacgttttccgtatatctactttgcttctttgaaactaaagagagaaaagagaggagtgcgtggcttcacgccaaggttttttttttcttccgttctaataataataaccatatcttttagggagagttactcggatgttatagaaattaggtgtatttacaagaaccatacaaaacattttttattactatcatattttggccctattttatatacccatcgtgtctctactaaacgttacaggaaaaaacgtaattacaaggaatgtcattgccatgtcagcaaaaaccgcgtcgtcaagtcagtaatcgctgacgtgtattaataaatgatatatccctatttttactgttttagctatgatttaggtataggttttagagtctatttattatttgtagagtcttttctagtcatttttaggtttttcaatgtttgggattcatttggagataattgagcattctggaggaaaacagagaacttatgctgcaaaagaaatctagagactaaaaatcgcgtaggtgtcgattgagactacccttggtgtcgagccacaccaatacttgacgacaattcaaagacacaacttatttaagttttgaagatttccaaattcggccgaaaacttttccttatttctaaagaaggcccatcacgttttaggttatatatatagattgtaaggtcattgtttagacctaagcttggagaggctaatcttcttttctcttttgtacattgggagcaaaaccctgtggagactccgttaaagaagatccttctaaacattaatctcttcttgttttgttcattgatttcttattcaatcatgttatttgctacaatctccatgtttgattagtcttctagttaggtttaggatttctcattagggttatagatgatttagtagattgcccctttgttaggttatttgtagaattcttcatctttagttgttcttaatgctagttctagtgtaactaactagaacttgattccggataatagatatacctgctataacacccccaaaccgctctaggccaagaacaaatccgaatgcatcacggttgactcccgcagccggcaaacccaggttcactgaatacgaccgctcgcccgaagttgtccaaccgcgagaaatacgtttacctttctatcatggcctaaggctttgcaacccgtaccgcgatacgcgagttatgatagtcggcgacaggactaattatatcatgggagacacgagatttactaaaataagagctttattactatcaatgaaaatatcgagttataccacctatacgcaaaacctatatctttacaaagacaatgcaaactacacctgttggcctaacatccttcgctcccactaaaggttacctgtaaaacaaaagtagaatcttgagtaatctagcattactcagtaaggccgggattctaatagtatcacccaacccaacccccaatcacaacgattaaattacataagattcacaagcaataaattgaacaaccactatcaatcccaatttagacatgctaaacaggcctctacgaattcatgatatcccccccaaggcgaggtctccacactcctagacacgacagtctaaaagagattatacccctcaatactacaacgtcatgtaccgcttgcccgggcatgacctggtccaaacctttgtaagccataatattacggagtttcacgtaacgtacaacagacggatggactatcatggttcgcctaacaatagttaaccccctattgctatacatcattacatataaccataatcatatgctgtccgacagcataacggttactctaacaaacgggcagcataacgattacacaatccttaagccaaacttcataaccaatcaatcaaccaagtataaatgattatgaaataataccaagtataaactagaaacctcatgcataatttaaaaataataactaaaacccaatccgtgtgttacttcacacggctcggttactcaccccctaaacacacgctttggatcttatcttagatcggagactctatcggaaactaactttatctttgatgccaaactaagctactcggcagagcctcgacattatctgaaagctctttcgggacgatttgctcgctcccgacgctcagattctcactcacggactaactaacattttctcggattttctcttggttttggtctgaaggaagtaatgcgcggaaggggcctatttatagggtttggtggtccgtggaacatgtggtggagaatggaccacggaggccagaaaagtgggtggctacgggtgcgacacagcggcgattgatgcaaaactgtcgcaccaacatgtgttcgtcaggacaccaagccatcttcgttcggcgacatgtggtggagaggtgtgagctagttccggtggcgcatctccagccacacattcggctaagcaagtgacaaagctgcttcctccacaagcacctcaacgacacgaccagttctaatccatacgtccgaaactgttcgatgatgcaacagcttgggtcctaagctgctcaacaacgttgccgtttcttgaccacaaatctgacaagtagcttaccctcctgcttgatcggaagctgatcagtgacgtgcccaatcgtcgatcacacacctatcgcggatcaatcatgcattgcccagggtcgtccatcgctcaccacgggccgatcctgcatcgtccctgatcgtctgaatatctatgtcatcgccccaaactcgatttctctcgcccaacttccattttcattgttcatcttgcaatttccctcgatcaaaactcttgaaagtatcctaaaatacttcggctcatcgccaacaattattctctttgatattggctgatggttctttgatagccttccctcggtcaatttggagtcatggtgaggggtattccccttaataaaattcgtcctcaaattttcaggggaaatgttacctagaacttctccaaaatgttgacaacataacctatgccaacttctttagactccttgtcttcttgaacttctctccttgaatctgggtcttgcatgcttcaaattatggctcaccgttcttctcgtcctggtactcatcccctttgactaatcttcaagggcttcgtcttcgttttgtgattctcctcatacccttgtattgacttaatgacttgtgtattcggctcctccccttagacttaattttacattatgtaaagtatgtcttttatttttcacactctcttactttagctattttcttcttcagctataaccttcttggttcatcgtcttcatcattttcatcatttgtttacttctcttcccttcttcacttcatcactctccacttttcttagaactcttcaactccatttctgtatatgtgatttcctttcacatatcatgtgtgttgctcaaaagcttaacacacaatcttgccttcatccacaccacacgcctcaagttatcacaggttttataggttaaggatggtcggcctaaacaactacggtttacttaacctctaggtttttaaggttgaagtcttcagggttacataaagactaatcctaacactcaactcactctgacaacaaaaatttaaaaccaacctatcgatctaacaacgcatggatggggttacccttccccaaatattgttacactaaacaaaactaaacgattacttgaatttaaacaaataaacaacacatataacaccataaaagaagtgagataaaacccatacttacctggcccaagacttgcatggtcataatgcttaaggtaatctattcctaaagtttatcttctcaatccgcctctacctaatgtcttgccagtttcctttttgaatgaaccaatggggaaagaaaactatttaaaaataaattcctcctcaaggttgtcatctccatcttttggtaaaaaacctgcttcgaacatccaagggtaaatcctatcccatctagctaaatgctaaggacataaccggttttctaattgtctttgtgactcctttgactcgataaaatattgaaaacacgtgtctcttacgagcatcaattaaccatgctctgataccatacttataacacccctgaaccgctctaggccaagaacaaatttggaagtatcacagttgactctcgcaggcggctaacccaaattcatggaacacgaccgctcgcccaaagtcgtccaaccgcgagaaatcggtttaccttgctatcatggcctaaggctttgcaacccgtactgcgatacgcgagttatgatagtccggacatgactaattatatcatgggagacatgggtttactaaaatcatagctttattactatcaatgaaaatatcaagttatacatactatacgcaaaacctatatctttacaaagataatgcaaactacaccggttggcctaacatccttcgctcccaaaggttacctcttaaacaaatttagaatcttgagtaatctagcattagtcagtaaatccgggattctaatagtataacccaacccaacccccaatctcaaagaatcaataacacaagattcacaagcaataaattgaacaaccacgacagtctaaaagagattacatccctcaatactatatcgtcatgtagcgcttgcccgggcatgacctgctccaaaccttcgtaagccataacgttacggagtttcacgcaacgcacaacagacggatggactatcatggttcgcctaataatagttaaccccctcgatcaaaactcttgaaagtatcctagaatacttcggctcatcgccaacaatcattctcttctatattggctgatggttcttcgatagccatccctcggtcaatttgtagtcttagtgaggggtattacacccgccataggtatctattatcaaaactattatttgatgagcctggttaataggtgtgtaataagaatcggtctatctactaaggtgaacttatcgaactcgtttagcatgcatgtttaggaatagggtttcactgcacgccaccgggaatcttagctccaagcatagttaatttcacggaacaccaccggttattctgatactatagtttgagtttaagaatggttcgataacaacctagctatcagtagatctactaatctctatttcctgagaataccctaaacctgacttttttcccatctgacttacatcttgatatttattgcttttctatgtttcttattttgtaatctattagtttagtttaatttaataaacaatagtctattgcgtgatccgagaactttttggaattcgacccgtaagtactacaatctcttatttaatgagtgatcttaaggaaatttgacctacatcaatgaacttagccgtaaagcgctacaacggcagtgatggctgagctacggtatggtgcgactgatttaagaaaaaatggttgagttatgagaaaacggctgacttatagtacaactctctctcgagtcatggctgacttaatgaaatttttctgagttatgaaataattcagcttacgttatgactgacttaatgagatttgctgagttatgagaatttgagcataacccaacctaagttacggcagagtttttaccctatggttgattggtcaaaattttggctaagttattccctcgacacagctgagtcaactttttatggctggctgagttatcaaagacgatttagatgtgggatatcgttacggctaatttatgttcgagtgtcataaatcagccgttatgagctgaattaacggataactcagcctagttacgactgacttaatagtgaaagattaattattataatatcatgcaattacggccgacatataaaacgaaacgactgagttaaaaaatttctgttgagttacgacattaaacggctaaattaacttgccgtgtttttgtttttttaattactgtagctttgacattaaacgacatgttgcgactgacttatagctttgtttgatggctgatttatttatgcaagttcgtttggtggcttacttgccacttcatcaattaaaaaataacgtcggatgcaacattttatgtcatcatcatcaaagaaaatacgaaacgccttttttaattcgtcttcttaacttgagtttttcacattaccggaacttctaattcgtcatcgtcttcctcattcttcttcattttctttcatctttctcctaatatgattgattcgattacggtaattgttggtaatgaagtaaagaatttgtatttaacactaacaataaagagtgtagagttatgcaaatagatgcgaaaacaacgcacaacaagcttgtgaagttggtactcgatgactatagattgaatgagttgagccatcagttaaagttgagctagatgttcttgaacaaggctatgaacaatatgtctaatcgtaacagctaagtcgtaataagtagatttactcgatctttcgttttccgtgaaccattataactcagccgtggcatgtaaatttgttgcaaaacaataatagagaggaaaaccaaaaagttcttcttaataacgttaatgacgtggcttttttttttaatgacatagattaatataatttccttaattatttttaattaaaaaaataataaaaaaatcttaattaaaaaaaatctaactaaaagtattaattataattacacaataacacaaaacatataagtaattgtaaaaaatatataatattctaacaatattccaatatttttacaagagagatttttatcttttatcattctcttttactttttttctaaaatataattttctaattatgtaccgttcttattaccgttgtctaaaattttgatttttttaattccggtttttaaaattgtgaatttttttttgttttattgatatgtcggtgctataatagttctatgacgtggccacaaaagagacacactcgtaagacatgtgttcaaatcttgtcctcatgcaaggatcatatgagccgaaatattctcttatactcgaaaacccaatcttcacattctcgtacaatcatcatctacacccaaaaagaaaaaggaaaaaaaaatcaatggctgaggagtttcatcttcctctaaacctcaccgaaccagaccaaactccgaccgaagaagatttcgaagcagacactacattaattgacgacgaatacctccgttacctccactacttggattcacggagcaatcatggagtcaacacgtttggatcttacgatgaaatctttggtctagttctcggtaattcatcctcttgtacgcggtggcttaacgcaggggaggaacttccggtggtggagtttacggctgaggaaatgatggagagaggtttagtggtttgtgctatatgtagagaggagcttgctgctaatgagaggctctcagagcttccttgtcggcattattaccataaagagtgtatctcgaattggttgagtaatcggaacacttgtccgctttgtcgtcataacgtggaattacccaaccacggttgagattgtgcatgtagtattttcttattgttccgaccaaactgtatccggagcctaagagttttatttttggtaaatattattgttaattagtaactactgtatctaggttttgttttcttgaatatgtgtataggttccttgtcaattatagtctatcttttgcataggtttcttcaatctatatgtcaccactattagattactcaattcttatattgtcttaattaagtcagactattattgcttttccttatgtcttatgtttctttgttcaacaaagagtcgcaactcgcaactaattcccaactcaaccaatcacaataacttggatagggctggagtttttctgtacagctgaaagagattaatggtgttgggctttgtacttgatgtccgtccggctcggataatgcccattatcgatttcagaggaaaggtcatcaagcccaatgcccaattttatttaacaaatttgaatccttctcaacttgttcttgttatttctcatcttgagtttgttatcaattcaacctttagtacaacaacgttaataaatagaagaaggaaatttccgatctttttcccgttggatttagtttctataaagaagttttgggcaatttataaaagaaataattcctaagattgaaaacatttgtatgtttattcctagaatagaacacatcttttttttattatttagatgttttcagtaattgtgtaattataattaatacccctaattagttttaattaattattattatttaattcgtttttaactaaaaattaaatgaaaaaacagtgattatacatgtcattaccataatccacgtcattaatcatctccaaaccgcataacgttcgggtttctttttcttggcgttactgttcatcatctcccaaaaaaaaaaaaactgtcgctttcttcctctttctctctcgacggaacgaaatcgttctctttcgccgttttgctattttctcgtctgttccggccgaaattcagacgccggagtcgcatttccgtaagtgcgaaggcacatccgacatctaagttccggtgagtatgtttctattaagtaagactcagacatctaagttcaatcgcaagtgattcccgtcactaaaatcgttttccgatgcgtaacgatggtttttaaagctgggttttaacgtcgtcgttgattgacatatggtggctgatttcttagatctatttgatttgacggctgagttactgtttgttttccgactgatttatgatttatcaattcatccgtgtctgagtttgttttatgttgtgactgagttatggtttaaccttacatcgatgactgagtttcttttatatgacggctgagtttgtttatgttatggctgagtttctgttttgatatagctgagtctggtttatgttttaactgagttgttgttatgttatggtttgactgagtttctgttaagatatggctgagttagatttatcttatggctgagttatgttatgtgtggctgagattggtttatgttatgacacagttatgttatctatgcctgagttagatttatgttttgcctgagttatggtatctgtggatgagtttgttttatgttatggctgagttatggaatgcttacggctgatttatggttatataaatgtctgaagaccaagcaagggagtaccctccaagactttaccaagaggaggattctaatctggagggtaaaggcattaatcacaacataaagctgggagagttccctgcaattagagaatcaataggaaaagatatatgggcagaactgaaagagacagagcctggattaattgctaagcttgttgatagtcattttctatggtctggtaagaccgtacattatctactatgcagacagctgagaatactgaagaaggagctttggtgtatcctggctggtaaacccatccggtttggattgaacgaatttcatcatatcatgggtttaaatatagatcaactgcctacagaaaagtttgggcctgaagctgactacaaagtgttcttcagggaattgcgtgtgccaaccggtgaaggtcctaatctagatgaacttaggcagggcttagtaatgtgcagagcttggcctcatgaaaagcgtagatggtttggcttattgactcttctatccattggactttttggcttgcatactaactctaggataccatttgagagtgccaaaagagttttcgatgacgaagccatgaagacttatccatggggtcgggaagcatttgaagcccttgtcgtttctataaagttgttgaggcatattggcaagacgtacaccatcagtggtctggttttcgtgttgcaggcttgggcgtatgattcaatcatcaccatcgccgagcgttttgggaacgttgttaaagcggatgagattccgttgcttagatggggtggcagccgtacccgtgcaactatagaatcggccattgctgaagatatcaaagcgaatgatggtgaggtacggtttcggctctgttatgttctgttttttatcaaatatttatgttacggctgagttaatgttttgtttttttgtcaagtatgttatgtgaaggctgagttattttctgtgaaggctgagttatgttctcttttttttttggcaaatatgttatgtgatgaccgagttatgttctataatggttgagttatattaagtgacgactgagatatgttctgtaatggctgagttagcttaagtgacgactgagttatcttaagtgatggctgagttaaacatactgatgggttttattatctcttgtgttgtagctgcgtgttcgtacaatggttgaaaaggctgagttaagcgagctgtttcattcttggccagactaattagaagacccagcactggataacttgatccaagacttacacgagcttaagcttgttaaaggttattgggatgtgaagacgagtgagaagaagaagaaactcgtaaaagataaagaagaggaggtgtctgaaactcccgcaaagaagcagaaggtctctcacagtgaggatgttcattctcgtgagaaagatgcagaaaagaagaagaagaagaagaagaaggaagtagctgtcgaatctgatgaggacgaggatgttcattctcgtgagcaggatggtcagggagaacagcagtcgctcgtggatgtggtgtccaacttgatctctcccttaaactcaaggtttgacaccgttgatactagcataaaagaaatgttctcccgtctggatgtgattggaggtcaaatcgaatcgagggttgaagcaaagtttgaaggaaggtttggatcgattgagaacgatgtcaaacagattaaagagtagctgaaggccatatctgactcaaaatcaagcatatatattagagatatgtttttagccaaaacacagccccaaacgcagcaagacaatcctaaggcccaaactcaacagacaccagatgttccaaagaaacctacaaataaccaatctgctactcctagtcctcctccggtaaacttttagttagttatgaccgagttatctgaatattattcggctgcgttataacttttagttagttatggctgagttatctgaattatacggctgagttatctgaatattttacggctgacttatctaaatattttacggctgagttataaacgtttgttagttatggctgagttgttttcatgttataaatttagttagttatggctgagttatatgaatattacacggctgagttataaatttaattagtcatggctgagttatatgaatatgatacggctgagtttagttagttatggctgaggtatatgattatgatacggctgagtttagttagttatgactgagttatatttatacataggtatgagttttcattatttaacgcctgagttttcgttacgtttatgtagtcgaaacaagctgatgttggggtaagtaggaatcttgaaggagaatttgataaggtctccattgtgtctgattttgatttcgttgagactgtttctcctctcaaccgccgtttacgctctaggaagccacaatccccaaatgtgccaaagcaaaaaaaggagaaaacattaaatgagctaatccagaaaccgccagggagaagaggaagaaagccttcgcagcagcctaaaaaggtgcctcctactgtgccaaagattacaataaagaaaccaaaaccatctattgaagctaaggaaaaagctgaggaagattcggatgtcacggataaggttgtatccgagtataatgaaatgcttcttgaatctgatgaagatgaggaggaaaccgagaggctaaagagtttaaaagaaattcggctcaaaactgttaagctggtcccggatgggagctcattgattaaccccgaagctatgcccactcacacttttccagttattggagacaacaggctgagctgaatgagaaagggttgtctgccttcacgagcaatctatgatcctcttgcaccgttaatccggccaaactgtagaagcttaaggcttatttgacaagtcccgaatggtatggccttttatacattactaagttgataaatacgacatgcttacactatttgtttatattaactttctttactatttgttagcaaacaacctttggaatatgggatggacaaggtgctgttctactctgttatcatggccgaaagaaaggactggccagacccgaaacatggatggctgggtgatgatgtaagttattgttaaattctgtctgagcttggctaatgttatggctgagttatcgtgtcgttctgtctgagttaaagtagataatggctgacttacgatgtaagttattgttatattctgtctgagtttgtctaaggttatggctgagttatcgtgtcgttctgtctgagttaatttagctaatggcagatttatttaggtgttaaggctgagttttacttggttacggctaagttaatgttgtgttttgtcttggttttatttttgtccagcacattgctgcgtatgtgaaaatcctcaccatgaggctcctgcgagatcccaccccatactacagcgaacgcatcatgattctagacccgtggttcacgtcaatgtggactagggattacacacagtagacgatgaagccgaagagggtttctttcaaaggtaccgcgtatgaaggttggatcaacggtacggctggagaagacccgacaaacaagaagtggataacagatgtggatcacttgtatactatcctccaaaccggaggtaatcattgggtgactcttcacgtggacttgcctaggtgtcacgtggactgctatgattgcatcatcggatgtcatacaaagaaaagcgatggaaaaatcctggaacattgtagaccgttcacgaggatgattccacagatcatgagctaacttatccctcccgaagtccgtgtcccgcaatacgaccaattttcattccggcggaggaacattacaagggtcccgcagaatactatcactggggactgcggcgtttacacgttaaagattcttgaatgtttattgcttggtgtttcttttgatggccttactgattcaaatatccaggggctacgggttaggatggcaacagagatctacgatgaactacctcacagaatgctcattcggttttttgagacatgatttgctttttcgaacatgtctgtgtcttttgggatttttagcatgtgattgtactaaatattgacactttaggatttataaccagaattatgtctgtatgaatctattattatgttaattataacaaaaaccaatgtaatggctgacttatcatcgctcgattcgttttacggctgatatatgctaacgtgaaggctgacttatcatcgctcaaatcgtgctacacggctgagttattgttgtttaattcgatgtttagctgagttattataacgcggtggctgacttgtcatcacacaaatcgtttgatggctgagtttgtataacgtggtggttgacttgtcaaacccaaacttccctcccatcaaataaaccagacgttactttaggactatacatacaccggtttacgacacctgaatagtcaagaacccaaacgtcattagaggaccaaacgtcgttacgttagaggaccaaacgtcgttagaggactatatatatatacactggtttcctcttgtcttttcacttgtcgattcttagcaactacaactcttcattcttctcttgtcctttctctgagaaacaaaaccattccgagatcatggatgcatcaggttcaggttcaaacaagcggcggtgtgtggatgacggtcccaacaagtggccgtctgtggatgacacccccaccctaaagctgtatgaacaggagaagcgtttcaaatccgtcatctcttacatcaggagcaacataagggagacggcggaagcacacttgctcgatctcaaactgcatgagaagaaagcaaaacttaaggtcttaaggagagtgcagaggatgggggacggatttaacgtgggggaggagatcgagaaagtgctggagcaggttggcaaggcctacacagagcagcgtgaacgcccggtgagtagtattgattgggagaaactggggtatggatccaccggacgtccaatttcggagtccgatgaagaatgaagatggcgattgatgtgattgtatcttcattttttattttcaattatattatatgtatgttattggattccagtactccttatcctatgttatcataaactctgtcttttcaattttcaaacttcactttttattttatactcgcgtgtgtgattcacaaaactctgtctttcagatttatcgtagattaacttgatgtttggctgagttaaacatgtgactcaatcattgttattctaacgttaaggcggacttatcgtacattaacttgatgtatggttgagtgaatctaacgttacggctgagttattatattttaattcaacgttggttgagatagtattgagttgtggatgagttagtctaacgtaacagccgagttattataaatttaattcgattgtacgttgtggctgagttataatcgcacaattcgctgacttaatgataattgacagtacaaagaagttcaaattgagaaaaacagattaagctaagatcatagatacttgttcaagctctcatacttcttctctagcgtttcaaacttcttttccataagaaagatcttttccgcctgagactcgacgcgcttattggctgcttccagatccttcttcatctcactcgtctcctcttttatcatgtcaaactcgtcacacaatgcaacagtccaccatctcttgaaaccacatccttgaccgggacccttataaaaaaaaacaggaggttgattcatagggatacaaaatgaaagaaataaaataaagaacattaactcaagaaaagatgcttacatctgatatttcgtacggacaactgaaaaaaagtttttcggttgtaacaggatcaagagaagtggcaacgacaaccttagcattgcaatcacactcgatcggaacgcccttatcgcgcctcctgttttcgccgtacctcgttcgcatccttatttccatacggtcgagctcctacattaacacaaacatgatatactcgacgttagatgggtaacgatttgtactattcaaatgtggagataaatacctcatcatcactagattcgccttggaaaagagatctctgagccatcatcttcactgcaattagtatggtactaaagcactggttctatatagtcgtgtctgccacaaaatttactaatcaaacgacggcgtctttgtattggcagaataaatttagaagtggctgacttgtcatagcattgcggctgggttttcactgatttgtggctgagttatgtcgtcatacagtatgttactacttagcgtgctgctttaggttggatgtatcgagattatttattatatcattatcgagataacaaacagcaactttatggggaaccgccagtaatgatttggtccacatgcacaggtatacacgcccgtaattaatattcaaaataattcaaacgaggtcaaaattattccttaactaaaccctccaataatcaaataacgttacggctgagttataaaataagatttcgtgttttggccgagttatgagataccatatgttattatgatatatcaaaccagccaccaaattgttggttatattagtagcgtcaagatgtgcaatttgaaaacagaaaataacttttattttcagcaagtgtcgattgacaaaacatggtctttcaaaacctctaggaagtatgttgttggatatagtatgatgttggacaaagtaggatgttggataaagtttatagtatatgaactagtttcacggttccactagttggaatttggttatgatgtgttaattacttaattttcacaattgttggctcaagaaaagcactttcagggtttggccgagttgtaacaaagtgatggctgagttatgcatgtgatgtggctgagttatgttcgaagatttcgattgttcgaactacatacaagaaaaccaaatgttattatgagatttgaatacaagcattattgttggttcgattgatgtcctcaaatcagtcagaatattgatgtgttttgcttttgctgagtttatcgagaaacaattattatgttattctcgagattaaaaaaaaagtcttaatagggaaccgcgaataatgattggtttcatagatgcacgaacacatcaacagatgataattcaaacgagttcgaaattattccttaactaaaccctccaataatcaaattttctgtttcgacgtggaatattataacgttacggccgagttatgcaataagatttcgtattttggccgagttatgagataccatatgttattatgatatatcaaaccagccaccaaattgttggttatattagtagcgtcaagatgtgcaatttgaaaacagaaaataacttttattttcagcaagtgtcgattgacaaaacatggtctgtcaaaacctctaggaagtatgttgttggatatagtatgatgttggacaaagtaggatgttggataaagtttataggatatgcgctagtttcacggttccactagttggaatgtggttatgatatgttaattacttgattttcacaactgttggctcaagaaaagcactttcagggttttgccgagttataacaaagtgatggctgagttattcctatattgtggctgagttatgttagaatgcagagaaaaatattctccgctattgaccagatacgacgtcggtttgttacagagtctccgttattgaccagatacgtcgtcgtagtgacacacttataaatccccaaaacgaaaccctaatttataaaattccaatttctgatttcagatccggagcttcttcttgcttttcgtttccgaatttcccagctaaaaattaaagaaatgagtagcaattccgagaactcgattgcgagtacgcaatccgtcagccgttggggacgtgggttaccatcgaagtgtcattgcggattagacgtggtcatctatacatcgacgtacgcaaagaaccctggaagaccatacttccgttgtcctacgcgtaaagatgtaagtatataattgatttgagggttttattggtttcgatgttaattgcggatgtgattgaatatgcaggaccatttgtttaaatgggtcgaagatggtacatacgaagtggttgtagacagttggccgaaattgtccgtcatggacagtgagttaagcgcggccaagtccgaggttgctgtcgagctagaagcgttacaggcgatggtgaaagaactgaaggaaaaagtaatgaggagcgaaagggaaaaccagatatggaaattgatgatcaaactttgctgcttttgtcttgcctttactatcattgtcattgtttttggtatcttaatgttcccaaaaatcaacgaacagaggctttttcttggctactagtttgttttatgtttgtatgaattgctagctactggaatccattatgtgtttgatgtttttctcagcgtatagggttaattcgtttttttggttcaaagtagtagcttgcaatgaaatggaactttgtgttcggccaagctaatccaatatcgttgactgagttatactggtaatgttgtggctgagttaatcatacgctgtggctgagttaatatatgttgtgtcttcggaaatataggttacggctgagttattataatgttgtggatgagttaattatacgttatgactgagttaatcatacgctatgactgagttatgataaaatttaacaagtaacctcaagcgataacaactgactttactgagaaggcgatcgtagataacatactgagttcataggaatgagataaagggacgataagtaagagacacaaaagcattcaagacatgaaaccaacatcatctgggccaaattcagtaaacatgtccaccaaatcattccaaactgttgtcgtcatccacctcggcttatctaaaccacgcgcccatctcgtttcagcgcccgcatattgtcccggtacaacgttctagccaccaaattaaactgcgtccacaccgtcagcgtgtgccttgaatcccaggtgtgcatacgctaaaaagagagcaaatagtaagaatttggtctacggtttacagaaagtgctttatataaaaactcgatgcttatcgtgaggaggaaaaaccatcttgccttgaaaacaacgggaatcatctggtacgtcggccacgcatggtgaaagttgcgctggagtatatcaccaatcgcgacagctagttggtgattgaatttgaaccacgtaacagtggttttgtcgacccatgtacccaatccaaggtttagaactgggagatctgcacgatcaggagcagtgagcacgacttcgacatctcttagaaactgtccgtcgatgtgaggcaccatgtcgttaagatgtgaggatgagacgtctaaatgatgagttcaagtaactgatatatagaaaagaaaagacaggtagaggaatgcgaaaagttccgtgtctgttcgtttggcgggaaaaatttccgtactacggctgagtttggcggcaaaatatattgttacggttgagttatacccaagacatgtaactattatacggctgagttgtcaagaattattaaaaaggacaggtaaaggaatgcgaaaggttccgtgtttggcgggaaaatattccgtgctacggctgtgtttggcagcaaaatatattcgttacggctgagttacactcaagacatgtaactattatacggctaagttgtcaagaattattaaaaaggacaagtaaaggaatgcgaaaggttccgtgtttggcgggaaaatattccgtgctacgactgtgtttggcggcaaaatatattcgttacggctgagttacactcaagacatgtaacaatgttacggctgagttgtcaagaattattaaaaaagacaagtcaaggaatatgaaaggttgcgtgttacggctgagtttggcgataaatcgtccttgttatggctgatttaaacaacattacggctgagttgtcaataaaaacatgaagttcaattcgatttactgactaaccgaggtacggttatctccggcccaattaccagcggtttaatacgcctataaaatcggcttctcccataaacaccagaaggctaaactctcacaaacagaagctaacgagttcaaaatatttctttaattttcaacgactcagaatttcaccatgggttacgacggcctccgcgacttgaatccttgcataacttgctggacgatttgtgttatggtttttaggatgtacatctcgtttttcacagataactcattcgaactatgggtcgtctttgtcgatgagtgggtaatggaatcttcacttgtgatacgagtcatacttaaccttgtgcttgtcttattccctatataactcaccctccaatgttgttttcatagggtatccaaattgaagctataatcgaaagtcggttttttcaacgttactacgacatgcttgaagagaatcagtggaaagaaatcagaacctttggtgtcatcgaaaactgtggttttgtccgatcaacaacccacaaatacatgattgagctcatgaatgcaactgaggtaactcattccgacccaagggaaactgtattatttaacagattcacaccttttgactacattattgaagacaccgctcatactgaaaatttggtcggtaagtaatatgtatctaatgcaaatttcatactttcacatgccagtttttaatctttatttcatactccctgatttggttggtgcactcgtcgatgtcggatgtctgagaaatattacagaagatggttgggagatggacggattcagacttaccttcgagattatggacaaatagtataatttcttttgtttctttacttctaaatttctttcttttcatcatgtatttttcttgagaggggtataattgtaacactgttttatatgtttcagtaaggagaggttgaaatgtgaggcttttggcgaattggcggttgacttgcataggaaatttcgatcttttcgcaatgacagtattgttattgacaatatatttgttgcactcacatggtggaagatctttaggtatcatactggcctcaaacacgtgaagttccaaaattatgccgggatatcagatgtgactgtcgaccccaatatcgaagaagtgcaagagttaaaaatggtcctcgagtaatgcaagatggaaggaatcgagttattaccattgtttacttttcatttcctccaatgtatccttcaaacaactatttctgggaacttcattttgtctttgccttcaaaattcagtttgataactcagccgtatttaattaaataactcagccactaaataacataatacgaatataactcagtcgtaagttaacatagtttatctataactcagccgtaacaggtaaaataaactcaactcggccataacatgtaaaatgaccgaacctttccacttccctaattatataactcggccataacatgtaaaatgaccgaacctttcgacttccctaattatataactcggccataacatgtaaaatgaccgaacctttcgacctccctatttaaataactcagacgtaacatgtaaaacggccagaatattttggcaaataacttagtcggaatgttaaataaatagcaatattacggtacttagagtctacaatgtcatgaaatacataccacggttgccaaacaagggaaagaagacacatacagagtacaaacagtactatgcacggcaagttttaacattgcgcgctgtttcttcacatcaagaacatgcgtgttccttcctagggcgtttagtctcaacggcaacttctagtgctgatttcatccttagtttcttgggcctgcctggctggttcgcaacaatcggaggcaaacacggttggtcaattacaatttgaggaacagggacttctgtatctgaaggcatgattgcaccagcgtacgcattgaccaaatgactgctcttataataaggactacacagggatatacgagacacacccatatgctctgcagctgcgattgcatggatgcatggtaatttctctttgtcgaaaagacggcatgtgcatttcttttcatccacatttacaacatgcaaagatgctccataagctacttgaacgcgggaagcatcaatcgtttgtacatccagaagtcttgacgaggtgacgcgggtctattagagagaagagacaagaaacaaaacaaatacgttatggctgagttattccctttatggctgagttattctcgttatgactgggttatcattattcgacgactgagttatgcactagttacagctgagttacctgtaagagtttctcaacaccacgtgtgagctgagtatgctgtttgctcgcatcatctctctgttcagcaaaccatcttgtcatcatatgtcttatcgcttctaacaatcgaactatgggaagatttctggcttgtgacagtgctctgttcattgattccgctatattcgtagttattaaattgtatctatcaccggggaaatgaggacgcgcccacatttcaacacccgctctttggaggtatgcatgtagtagaggatcacgctcttcaatctcgttgaacgcgttagtaaaatcattcagcctataacaccttgccgctttttttaccagagggaacaaatcttttcctttgaattttaccaaaatgttcttatacagatgataagtacaaatcccacgagcagccaacggatacagttcacctattgacttatgtctgtccgagattatcgccaagtccattgcatcaggaataacaactttgagttgcgtaaaaaaccaacgccaagaatcatcattttcagtgtcaactacaccgaaagctaacggaacaatctgaaaattaccatcctgagcaagggctgtcaagagcgtccctttgtaactaccatggagaaaggtaccgtcgacaacaacaactctgcgcatgtaatgaaacccagcgatactggcaccaaatgcaatgaacatatagttgaatcttccactctcatcaatttgaagacacacgactgtacccagatttgcccgtcttattatgtataggtaagaaggcagttcttcaaaactactatcaggggttcccagagtgagctccgttgcaaacctgagcgtcttgtatgacttcaaataactcatctgttaacacaaacatattaatagataagtcaaccataatatatttacaacgcagtcaaactataccacaactcagccaccaagtgatcttaagtcagcctttaaagtcataactcaaccggaatgtaattatatgtcagccatactatatcaataagtcaaccataaaatatctataagtcagccaacagataaatagtaagtcagctgaaacattgtaattacctttactcaaaaatgcttagtgatgattattccgactgattttggtttaacatccggaccaacgtcaccaagatagtccctgtaaagaacttccagaacatcaggtgttgcttgtcgggatcgaccagaacattccgttacaaaacatgtgtgttccgaatcgtatatataaacatgaaaattag

SEQ ID NO: 486 - DNA, 85567 bp, Arabidopsis thaliana
gatcatttccttgtctagatgcacgaaccctccaaagacatatatccaccaagcactcgtaagatactgtagtcttaatagaagttggtacatcaaaatcaaatccatcccttatcgcaagaagtttgagtcgatactccaacttgaatttgctacggtattgttggcctaccgcgagtgttagcgtagaccaccatcttcaaaagactatcgtaaactgctctttccgcttatagctgcacaactctacaccctctttcgtcggggttaaatacgaatctctgtttctttacccacgaaccggaaacaactatgaccgtaacgggaccagccatatcaagagaaagatgaaagaaattgaagatgtatgagaagatgaatgaagaaaagaaagttccggtgatgttgtaacgttcaggcggtgaacatagtctgggaaaacgagttaaagaagcaagggacgtttcgtatttccgtcgaggatgctgacatggaatgatgacatggattattacagccgacgtcgttttgaagtgatgacgtggcaagtcagccaccaaacgaacagttcataacacagccatgaagcaaatctttaagtcagccgcaacatgaatactattacagtaattaaaacaggaaaaaaaacaaagttaattcagccgtggtatgtcgtaactcaactaactcaaccgtaacgttcaacaactcggccataactgcatgatattatagtaattaatcttttgaaaataagtcagccataacatggctgagttatatcgtaatccaactattagcggctgatttataacactcgaccataactcagccgtcatatcgttccataactaagctgttcaaaactataactcggccgtctcgaggaaataagtcagcctttttctcataactcagccatagtgttggttgggttatcgtataacttcttataactcggccgaccatccttaactcaaccataccgttgcctgagttatactataactcagacaatattttacaactcagccgtaacgtctggctgagttatactcatacttcgccgttttgttatgactcatatatttttgtcgtaagtcagccgcaacataccgtaactcagccgtaactgtcgttgtatcgcgttacggctgagttcatttaatcaacgtcagcaaattctgacgtggcagtggaattccttgaaattacgttttttccggtaacgtttagtaggggcacgctgggtaataaaaaaaatcgaaaatacaacagtaattaaaaaaagttctgtcgtgttctcttaataacacctaatttcttacctatcacagttaatctccctttagaaaaaaaaaaattgttcttaaaaaagaaaaaagtataaaaccaaatctaaacacaaaacctacctagtgagagttctaacatccacgattatcgagttaatactagttgtcaagtgtaatatatggacattggcatcaagtgtcaaactacgaaggattcgattcgagatagaaggtattcccttactatacagtattaatggattggcgacattcgacttcgaagattgggattgttgaagtgactcttcatcctctatgctatgatggggcttcattgttacaatttgctacaaagggcaaacttagatctcagttatttaaataaatacaacaagcaaatggcttgttctacgtgttactatatatttttggttgcaaaggatataactaacgtgggttattgtcaaaacaaaaacttttttggcaaaaattttgaatttaggtattttcggtttgggctttgaaaaatagaactttggaccctataaattgataaatttgcgcttgtcttctattcctcttcttcttctccatcgagcctcttccttcttcatttttcagtccacatcaatttcttgtttctttttcaagaaaacttataattatttttgaattacagaatactaaaccttaagatactatatacggaacccaagcaacaaatttaatagattttatgagagaattttagttctggttttgtatatatatgcatgtatacatgtgtatttgtgtagttatgccattggaaagcaacccaaaaatcatcggatcataaatcaactcaagaacatcatcctcatcgcccatatcttcctccctgataataaacattatttttttttgtttctagatctgatgaaacaaggatagaaccgtcatttcaaattagtaaaagtatttaattttgtaagtcattgtgaaaatcttaaaaaatttaaactttttgaggcattcgagacaattaactctataactaaccgttcattgttcattgatcctataactaatacttagcaagtgcaaaagccacaattatcatcctaatttgatggtaaatcaattcattgatccaataacaaatacttggcatatagaattgttgaatgtccctattgatccatagaaattcaaattatccagagtatacaatcattattgttttcaagaaaatcacacttagatttacaaaagctggaaaatataagttatgccccttttatttaatactttgtgttgtcatcaaatgaaatgacataatatacttataaaaaccacttacaaaacttagaaagattttttttttaaatgacatgtcgtataaaaactcaaaaacctacttatttacgattttacaatcctttgatttctcaaaccaatgatatgttcatttaccatttactggaactactacaaatgtatgagaaaattaaattattagaaataaataaataaagtatgagatcatgggttatatttatatatgactttgcatgtgttgccctttgtatgagatcaaagtttctgaccctaaaataatatcaaaatttctattaaaaacaacaaaaacaaaaattctctgaccgcaaaaccctcatgttttactcgctggaactaaaaaccttgtgagattgatgctgaaacattattacttttcaatttcaaacagttaccaaagtcatattcataccaattgtgttagctttctttagttttggtgtagggttgtggaggtgcctccctagccacccaccctatatactttggccttatccgcccaaaatcatacttttaatgattctgcccccttcacatcttgtatataatacaattcatcattattaattttggttcttaatgtatgagactctagaatctatttgctacaaatatttttttactcaaatatttcattttaatctttaatttaagcatactgtatatattaatcttttctaagagtttcagttaaattttggttaattttctattcttgttattaagattatattgcggaagctgtatagagaaagaacgtgggataaaatgaaaaagatgcattgactaagggaaataaatggtagaaagtgacaaggtgttaagagtgtgtctattcttgagggtacaagatctaagagcatatattatctttaattataagattgttttatgtcatatagactcaagattacgatggtactttcacatacatttcaatccaatccaagctttttgtgttttggatctttagaacttcaaatctttggactagaaaatacgttagtttcctctcttgtagctattggtttctatcaatcatgatatgtttatcagcttttattggtacgttaataaaatgaaaaaacatgtttctagctagacatatgattttttacggtttttaccaataaactcaaatgtaccctttatgcctcgaggatattactttagggatatgaacatactttacggtttttacggttatatttcctttaaggaaggtacatatgttcattaaatttgtcgaagcgattgcttaagtgaaaaaattaccttggttttaaactttaaacatgctaaagaagtgaggacctagaggaggaaaaacttttgggaagcaaagttggactttaagaaaacttactgattgggacttactagtcccgctagatgttatagtgacaaattatagtttaggcaaatatgttttaacagattttagtattatatctgttttggaatgttatattttgtaagatgatcaagccatcattgaagtatcgaaggaacatgaaatgtgtttgtgtatatactttttaatggtcatgtggtttcagcaattatagttctagaaaaatgatttcgtataagggtaacaacattgtacgttaaaaatgattaaggatgtgttgctagtatctgttgggccagtgacaagaagtcgtgctaaaatgatcaagaaggcatctaataaactagttgcaaaaaggggtatacaaggaaaacattcataaattcataaaatctagacgatctacagatgaataaatgattcactcacatatgcattgacagtaaaataagttcttaaaattttaaatctccaatctcaaatctccaatataagtatctttaattaaaaggaacgtttattaccatgcacaagtgacaataaacatatagtatacttttttttttttttttttgtcaaacaaacatatagtatacatgtaataaattaagtgaacgaatctcaatatgaaaagatataaaataaaccaatagtaatccaacaccagcaaggtatgacaaacgtaaagacaagtgttctcaatacacgtgttgaaatttgattaagcttttgatacttatgcatatgttgatttagtttggacccattgtataatcacttgattccataattaggcaagaaaaattgagttcattacttctcaatctttccaaagtgagaatctcaactagttttcaacacccacttaatgttgagttcaaatttgtatacttagtttaagttctatttagaaattaaatacaatataaaatcgtatctacaataaggtttcaatcaaattttagttttatataaataataaagatactttctcacttttaattattagttattatttatttatttgcctacgggacaagtacaaaacttttgaagtgcacatataattattaattattattttcatatctttattttggggttttatgagttttatttcaaaattttccaatgattttaattttattgataagcatttctatttttcatgtctaaattttttatatatatatttaatccaatatttcaaattagatgttttatatattacacacacatttaaacttgttatacttaatatgtcctagttttatcattatttattatatatttcatattttttaattctaaacaatatagactagttttttttttgtcgtaaacaatatagactagtttaaacaatgaaaaaattcgtagaaaataataataattttgattttttttttaaagtctaaattgttatatatagagtatatcttatcaagtacatattttaggttcagtgctactaatcatttcttattttacccataatattaacaataatttatttaaaaattagaaaaaatctgaaagattattattatgttttctattaaagattccttggggctggtttcttagtgctacattttttattggaagacaagttaaatcgaagtactctttccgtgcaaaaaccagagccgtcattttaggggtgtgttctttgtcgtcacgttaatgttcccaaattgtcctcaccttttgtctatggagttatggtgttttggaaaaaactgttttgacattcaagggcattattggagtatttgattgtaaatatttaaaagacaagaataatgtttacgattcaactaatcatgattttgatttttgctgccacccaactaaataaaagataccataggtaattacatgttccaaaaatgattggtaatataagtttttcaattgtacacatttagttagcatagaaatgtgtacttcttattttcagccatcacaagatctatttattttgctggtttattttgaaatcactcctttgtgtttttcccaattttgaaaccttgtttttatttttattttgccgaggtttcaaaggccaaagacctcttttctgtaaataccaaactttttcattttaactaatgatattaacattgtgccaagaaaaaacaatattaatattcttagcaaaaaaaaaaaaaaaaaaatctaaggtggacttcaattcggcttcgaagtgattctagtattccattgactcaaagagaggcaattggaaaaatttgtcttttttacaaacaacgttgatttgggatgcagactcaatgtgtaagtgtaattgaaaagatcatatataggtcaaagggctatgatacaaggtgatatttggaattaacctagggtattagaatgccctatatacgtttggattaagatctttaggtaatatataaaaaatatagcaatctttaattcttgaactagtttttaggttaagttagactattttcctaatatagtattagagcttatagttggcccaatagataaattcccacaaaaattgtttcttacttatgtggcccatacaaatgacatgtcttgttgtatttacgagatgttgggcttgatctgtttcacgttggaccgtttttcacctatatctcgaagaagcctattaaaatatctcacatcgattagaattaaaattcttggacaatataaaaggataagttcttaactcttaagttatcttttgggttaagttaagtcacaattttaatatagggttttgttcatattgcgtctcgggtaaaaacataagctattgcttctttgacgaagtttgatattttctgttactaaattatggggaaaaagatattgtaaatgtatttcaattaaaacaagaaatgaagtagggtcagagcttgtgtatgcacatgcatgcatttatatagatctaacaaaagaagattaagacaaaaatccccattactaggtattcaactgttcatggttccctacacacttgtgcatttatgtgtaaacactcttatatacaataattcgtcatatcatcttcataaattttatttctaatattatttttaaagaaataagagtcttgccttgtctcatgaaatctttgacaatttagtccaccactcaaaacatagagagaaagcgagaaagattcatttggctcatctataaattaaatctaactaaaacgtaaacatttcgaagtcaagaccctgaaaattttaaattgttcttaatcatttgtaatgatttgattttgtgattagcttttatacggtgcttataatgcgtttaaaagttcatgtacataaaaatttatctttatccactatggtagaaagtacaacacgtaatttatttatgaatggaatgattaagtaatcttgttttacagccacaattatatattatcgtcacgtcttaatctacctttttttattcggccatagtcttaaatatagcttttaaatttaacatatggaaacatgtgtacattcattaatgggtacacgactctaaaatatttaacgaccacatttaattaggaaatatttaacgaccacatttttgatctcaaggaataactgataccagtcgggttagtcgagtaccttggttggatagagacgtagagtgaccgtggactgaacgtggatgcctttcctacctgatgactagtcgatctagggaagacttgcatcccaaaagagggttctggtggtctcatcttatctcgttctcggggttggagcatttttgttgatattgatgtatgtgtctatgggtatcaagagatttccgaaaaatacgaaactcacgtgtgttgggttttatactcaataagcacatctagactagatgatctagtgataagctacgctacaaatttgaggattgatcctacaaatttatcagagaaaaataaagttacagcatgaatctagttaaataagtatggtcttcctaaaatctctataccttgctacatctagtgagtttagcatacttttgctaagcctgctaaataaatatatgcatagtctaaaatcgtctaaacaagtatatatatatatatatatgatgatttttaaaaaaaatttgaaaaagaagaagaagattttttaaaagatagaaagatgattatagaaaaaatgatttctaaaacctatgacaaaataagaatctataaagaaaaaaagatgcagtgattttcttatgggttggctaattttatagccataaactaattgcattttcagtttttccccctatactttttgctcctgaaatttctaccataaactttgataattctttaaattacaacatgtactttcagattcatccttaaaaatacatttcaaattgaaccgatcattaaaccgggattaaccacaaatccgcgtttactgtaccgcgattgcgatataccagattaatcacctatatccgttaagaaaagggttgactgattttatagctataaactaattgcattttcagctttccccccaacactttttactcctaaaatttccaccataaactttgttaattcttaaaattgaaacatgtactttcagattcatccttaaaaatatgtttccaattgaacaggtcattaaaccgagattaaccacaaaatccgcgtttattgtaccgctattgtgatttacccgactaatcccacacccgttaagaaaacgacgtcgttttgtctttgttatgtaatgtgaatctatctatatatgttatgtgttgtgttaattggtaaggaaaatgacaaatcgaaatagataaaactcctaatcataaggatagataagactccaaatcaatcagtcaacctaaacaataacatcctaaagagaatcaacttccgaaaatacatcatccaaaatagacaaaagaggttgaagattgttccaatgacaatctaaatcaataaagaactagaactactctcattgatcacatagactgcttctctgtgtgagtgtgactgtatcggctccatgtggtgtttcttgaagctccattgtaggcttacaaaacaacgctgttttcttaacggtgtgggtgattagttgggtaaatcacaatcgcggtacagtaaacgcggatttgtggttaatcttggtttaatgactggttcaactggaaacatatttttaaggatgaatctgaaagtacatgttgcaattttaagaattatcgaagtttatggtggaaatttcaggagcaaaaagtgtgtggagaaaacctgagaatgcaattagtttatggctataaaatcagctaacccttttcttaacggatataggtgattaatcgagtaaatcgcaatcgcggtacagtaaacgcggatttgtggttaatcccggtttaatgaccggttcaattggaaatgtatttttaaggatgaatccgaaagtacatgttgtaatttaaagaattatcaaagtttatggtgaaaatttcaggagcaaaaagtatagggggaaaagctgagaatgcaattagtttatggctataaaatcagagtagagagaattcacgtacacaacacaaaaattcattctctctcatcatactcttttttttctttctactttgatattaaagaaagttgccaacccccattaaaagtaattatttgtgtataattttgtttatagagtattttaaccacacaacactatcaacttagaacaagattaaattttaatgaaatggatatcgaattcatattttggtttatgtgaaagcatgattaatccattgaacccttttactttttgtaatatacgtgtatgttgcatagtaattagcttagtttgtaactagcttagtttgtcaactaacttagtaattagcccatatacacgtgtatgttacatacgtgtttaatatacatgtgtaactagcttagtttgtcaaataaaactactgatctatatcgtattttatataaaagtgttgttgtaatatgtataaagttattaaaaaaaaatttatagatgcaagactaaaaatacgagacttacgtatataataatttattttctaacttagaaattgctggattttattgaatgtagaatggagtccaatcgtcgacggaacacaaacccttccagaggaacagtttcaactcatcccactgaaattttaactcctcctacagaaacaacaatacgggtaaatttagtattatatatatatatatatatatatatattaaaattatacttaaatttgatagaataaataacattgtattcacgaaatttgtagaacaaagacaagtagaaatggacgtacatacaagaaaaaacattaattcaattgttcgacgaagcaattgccatgaataattatactctcaagaatcctacttctattggtagagagtatatggttgaaaagtttaatatagcattcaacatgaatataacttatgttttttttcaaaaacaagcttgatgaattcagaaaaagttacaagaagtggaaagctcttacgcacaaaacaggcatcacggttgatcctgatacatctttcataaatgcatctgatgcatggtggacagaacaagagtttgtaagtacatcaaatctttgtattaatcaattataattcaaaattttggtatcacgtatctaaattatttcaaaattacagggatgcaaattaacaaaaaacttgaaccgaaaaccgcctgtattttgggacgtgatgcaacgatgtctcgtattacatgatgttcaatcacaatctcaacattttgcttgtcaaagaagagaacaattgatccacgagcatggagttgatgaagaaggtgaagattactcagatagtgacagtggtaacatgccacaaaccgaggttcctgaaacgcaagaagaagaagaagtgtatcgtgttaccattgatgatgatgaaatattccaaaattctgctgctagaaggcaacaacgaggtaggccaaattttcagtcaaccgctagacgtggaagtagtgcacaaagatctggaggaacctcacgagtttctattggaagtggttcaggaggaagtcggagacgacaatcctttgaaacaacaatacaagacagcatcactagcttcggagaattccaacgacaaagttttcaacaacttcgtcctcgtgcttttgaccaagatgattacgatgaatttaaaaaggcggaagcgatatttaccgccctagatcttcccaagcacactagatttcattgggcatgcattaatgcacttaaggagctagtattttggcctaagtatttcattgatatagctgcaagccctgacaaggataaggtacaactgttagaagctatgactggtgtttcacgcaacaaccaaaatgtgccaaaatagttaggttcatgccattcatttgggagtccacattcaggaggtatatcatctggaagtccatccttagtgagtaataatttgggagggcaaaattcacccgggttttggggtcccatttatccatagtggagaacaccaccaaacgttgcacagtggggaacaccaccaaacgttgcacagtgcagaacaccaccaaatgctccacattggggaacaccaccaaatgcacagtagggcacgccaccagatgttccacaatggggaatatcaccaaatgctccacaattgcggcaaacagaaaattttcaacaaggtggttcaagcggaacgactccaacaaatgttcaatatggattttcagttggatgtcaagaagatggtgcaacaactgaaactccaccaatcattcaacaaacatcatcatctggtctcggtttcacaaattattttgaaactggacaaatgccacaaacacctagaccgcaaggatccaatgcaagtcatcacagtgatgtaggagatgaatattagtttgtgttatttgtggtttatcaatctcatttatgttttgaaatgatttatgtttttttttagtttaatgttgaatttatatttgtaaaataatctatgtataatgtaagaaatcgtttgtattgaatttcaggcattttgtatatgtcagttgcgatcataagaccttaacaatctaagttacgaagaaagaattgaattgtggaatttggaaaatgaacaaattgaagagttagtaattcaaccagctttgaattattatgacgatattttcaaagagcacggtccaaactgatagaggtttgggatggagaaatatatggcgtcgactacagcaagatgatgctgcttgtcttcaattattatggatgtcatttccatgtttcacgatattgtgtaatatgttgcatacaaattatggtcttcagccaacattgaatataagtattgaagaaagtgttgcgatgttactacggatatatgggcacaatgaagttcaaagagatgttggtataagatttgtacaaaatcaagaaactgcgcaaaaaaatttagagaagttcttacggcaactgaattattagcatgtgattatattagaactccgacaaggcaagaactttatcgaattcctgaaagactttaagtcgaccgaagatattggccatattttagtggattcgttggagctatggatgggaaacatgtgtgcgtaaaagtaaagcctgagttacagggaatgtattggaatcgacacgataatgcatccttgaacatcatggcaatatgtgatttgaatatgttattcacatatatctggaatggagcaccagattcttgccacgatacagttgttctgcaaatagcacaacaaagtgattccgagtttcatttgcctccgtcagagaagtattatctggttgattctggctacccaaacaaacaaggatttctagctctttataggtcgtcacaaaatcgagttgtgagatatcatatgtctcaattctattttggtcctcctcctagaaacaaacatgaactgtttaaccagtgtcacgcatctttacgttctgttatcgagagaacttttggagtttggaaaaaaaaatggaggattctttcggattttccaagatataatgttcatgttcaaaaaagagtggtaatggctacagtgggattatataatatcatcagaatctcaaacttctcaaatgtagattttgtagatgtaatgacagaggcaattataaacaacagagattttaatcatgatttagatgacatagaagcaacagatataccagatggagaacatatgacgcaaataaaagacaatattgcaaatatgttatgggaaaataaagtaatagataatattttttttaatattttttatgatgaaattagtcgacgcaagtaacaatatgtatgttacaaaattaaatttctattttgatcaatttttgtattattggtttataaatatctgttattgtttatttattaacataaaaaattaattaattattaatatatatataatctataatccgcactgcaagtattttttcaccaatcaaacattattctataccgcttattttgtttaaaccgcacttctcccgcaaatatatttctcccgcacgtaccgctgttgaaccgtaccgcactgtaataatgcttttcccgcacaacaaaaaacgcggttaccattcggacccttaaatgcagtgtaaagtgaagtgcatttttttgtttgctgagtaataaaggtgtcttgaaaaatgtgagcagtttttatgaaaagtataaatttatataactaaggctgtgattggtgaagagaaaaatgcggatttcaagctgcatttttcaaaaacgcaccttagcaaccaatcaaccaaattttgtatatttgcgtctttctaaaaaaaaagtcacgcatccacactaatatttgttttttttttaattctgattcatttaataattttaaaccaaataatatacataaatcacatatactatacaagtatacatacatccacatattaaggctctgttcttttttcacacgctgcgatcagatccagcgaccaaaaaaacagttgcttaacacataattactttgaaatctgtagagagttatgtggagaggagtcgctcgattttaaaaacagcgacctataaggcatatacacatgtcgccaaaattaacagcggctcaacatcttcgctagggacgtcgccggcgtccatattgagcgactgtttttgtatctccgttatcatttttatcttatcgaagtcgctgtcgctgtcgcaacgattaataaacgaacaggccctaaataaactactttattaatattatttaacaattatatattaaataataataactatatattttatttcaaattttaaaataacaaattcattttaatataataacaaatagattttataaaattaaagtatttgataatagttttttattatgttatactttgttttaatgattaaattctataattgaattacttttttatgatgaaactatttaacagatttaacaatatgtatgttaaaaaattaaatttatatttaaatcaatttgtgtattaatggtttataaatatttgttattgtttatttattacacaaaaagtaattaattattaatatatatatattccataatccgcaccgcaactagtttttttcaccaatcaaacattattttgtaccgcttatttgatataaaccgcatttatcccgcaaatatttttctcccgcacgtaccacagttgaaccgtaccgcactgtaataacgctttctccgcacggtatgacaatgcggtacggttcaactgcagtacggttcaactgcggtacgtgctgaaaagcggtatgatagtgtggtacggttcaactgcggtatgtgcggaagaaataagcggtacaaaataatgtttgattggtgaaaaaactatttgcggtgcagattatagattatatatatatatatatatattaataattaattaatttttgtgttaatatataaataataacatatatttataaatcattaatacacaaataaatcaaaatatacatttttaaactttaacatacatattattaaatccgttgaatagtttcatcataaaagattgaaaaaaatcataaatttttacaagtaaattgattatagatcgtatataagcttatagtggataataattgtcaaaatttctagaagtattgtgatgtttctatttcctgtaattgcatttgcatagtttttaattaaataaaagggataaaactatacttattgcataaatagagatatatatacatatataaaattttaatagtgcaaagaaatgaagaaaattgatatataacaattctctggacatcaaggagtaataacaaggttgttgaccttcgcacaaaaaaatttaacacgtgaattcaaccttcacaaaaaaataacaatataagcagctattaaaaaaaaattgatttctttcttagaatacggttttgcttaaaaccgctaggtaaatgattattcttctttgggagatttgcaaaactaccattttttactacccttttatgttgtccatttttaaaaataccccttctcttgaacaaaatgaccaaattaccctcatctaatagaaacatgtaactggaaactgaacttttcccgccaattttttggcgccaaaatttttttttcccacaaaaaaataagttttcgtcaaaaaaatttcccgtcaaaaaaaaaaaaatttcccgccaaaaaaaataaattcccgccaaattgttttttcgtaacaaatttttcctaacccaaaataaatattttaaaaatccttgtaaatattttttggcggcaaataggaattttaaaagggttttaaaagatttacaagagattttaaaaaggttttaaaagatttacaagagattttaaaagagtaaaaaatttacaagggatttttaaagggttttaagaaatttacaagtaatttttaaaggttttaaaaccccttgtaaatctttcaaaatacttttaaaccctttaaaaatctttataaatcctttgtaaattttttaaatccctttaaaatcccttgtaaatattgtaaaacccttttacaatcccttgtaaatattttaaaatccttttaaaacaattttaaaccctttaaaaacaattttaaaccctttaaaaatctttaaaagacctttgtaaatcttttaaatccctttaaaaactcttgtaaatcttttaaaacccttttaaaatctcttgtaaatcttttaaaaaccttttaaaattccatgtaagtcacccatttaaaatcctttgtaaatattataaaacccctttaaaatcccttgtaaatcttttaaaactcttttaaaatcccttgtaaatctgtttcccgccaaagaaaaaaattggcaggaaaaatatttttgaaaacaaaatttggcgggaaactttttggcgcgaattttttttcgaaaatttttggcaggaaaattttggcgggaattttttgtcgaaattttttggaaggaaaattttggcggaaaatttattttggaatattttaggcaaaaaaatattaatatttcattttgttaacctaaaataatttccaaataagggtaaaatggtcattaaaaatttaaagagggtagaaataaaaatggataaagcaaaagggtagagttgaaaaggggcatcatgaaaagggcattagaaaaaaaaattcttcttcttttgaaaagcgttccagtgtattatccactagacaaaaccgcaaactttttttttttcgaaaaccgcaaatttgttaaaaatattatgattggtatctgtattgtggttttaataaaaaaaataagaaaacgccttttataagttttccaatcacagtctaagtatgattggtgataataaagcgtttttcaaataaatattgaaatccgtcctacaatcatgtttccatttaagaccttagcatgtctctatagataaacgaaagaatcagttacaaaaagtccatttttaatagtatttataaatttttcattttgcctaaactattttagaattactgttttttatatctaaaacacacaatttataaattatgtttggggtataagattttttattaaatatgtattttataaaaactattcccaaatatttagtttttaagtggcaagaaaatggcacatctaaaatatttaaaacagaatgacaaaatccaaaagatttgggtgagaaaatgtctaagtcaacaataatctctaggaaataaagattttaattttttatttattttgtgttctgctcaatattgtgtaaatacttttgaggtttttcatcatcaaaaacaaagccattacgccgctaaatccgtagagtttacccatattatagtttgttataattaaagattagctccaatgtaaataaataaatatttgctttgtcttttggaattattactgattttgatatttttttgagtgatatttatgattttgctattttctttaaaatcttatggatttgatattttttcttaaaaagaaaattttactttgttttttcttgggttaaaatacataatttgtcataactattaagtcctaaaaataaatgaaacagactaaatccaaaaataacaagtaaaacacattttaaattatatttttattatgtctaaaatattgtatttcttatatcctaaaaaagaacaacattttaacaaaaattacaaatccacaaatgtcactctgaaaaattacaaattcataattgattcttgtcttttataaaagataaaagatatatctggttttaatttctttattgactgaaagaaagacaattggttttaagttttctcactgcagagaaaagacaagtttctttattgacgcaaaaaggcaaattggatttgaaagacataaatgactcctcacatcagcaccactcggtgctgtgatatttaattttttttctttggtatatacgtttaagacaaaatgtaaattacaaaaataatgcaaaaccttactactcgatgatgtaatgagaaaaagcaattcaataagaaagaaaaaaaaatgattatccactactacttctcccatacaccagcttatacatatatatctatctagataaaaaaacattaatggagaagattgatgatactaattatatcatacataaaacatgtccttgataggccaaagaatgcggttgagatgcctcagatacctttttttttgcgcaatgtaagtaaataagattgcaagaacaaataagattattttttttagaaaataatgagaactaagatttaaaagaaaataactttgttacaactaatgcatcgtttggtttataatgaacaaataagattttttagaggatatggaaggtttatcgctcaagaatagtgtaaaaaattagggttttagtattaagttgcggatgttttatagtagagaacaaacccttcaatttatacaattttaaaacggtttaaagataaattaaacttctaattctttagaatttgaatcttctgtttttccattcttttaaaaataatgttaaaattctagaataaactaatagtatcaacaaatagaatgtattatttgttaataaatttggtttggtaaaaaacaaaattaaaaaacattatgaaaacttgaaatgccctttctacttcgcccaggtccctcctcatgtgtggaggtttttcttgactcaaaagaaaaaacagtttggtcaataatattcattaacttttaactttctatagacaccatttgattacactattaataagaaacaatataattatccaacctttacctcgtagaccccggcctgatcgattttgtcaaatattttagtcagttggttgagaaaggttatcaatgtatgatatgttttaccttaatcaagacaattacggatataagaaataaatacatgtatatacatatatattaatatgacatgctctatgtgcataattactaaattctcatgttagaaactttgttattgcttcacccaattgcagaaagtgggctccattccccaacctctgctctcactctctataaaatccatcttctctcttcacacaccaaaaactccatcagaacttacaaaacttttttttttaatatcttgacctacatttgttttcatcaagtaataaaaaaaaaacctaactttcttcccaagtaaacttcaaaatgcagccgcaaacagacgttttcagcctccataactacctaaactcatcgatactgcagtctccgtatccttctaatttcccgatatctacgccatttccaaccaacggtcaaaacccgtacctcctctacggattccaaagccctacaaacaatccacaatccatgagcctaagcagcaacaactcaacatcagatgaagcagaagagcagcagacgaacaacaatataatcaacgagcggaagcagagaaggatgatttcaaaccgagaatccgcaaggagatcgcgtatgaggaagcaaagacaccttgacgagctttggtcacaagtgatgtggttaaggatcgagaatcatcagttgcttgataagcttaacaatctctctgagtctcacgacaaggttcttcaagagaatgctcagcttaaagaagaaacatttgagcttaagcaagtgatcagcgatatgcaaattcaaagccctttctcttgctttagagacgatataatccccattgaataaagcatttttccccgattcatatttatgaaaattttcttcaagagtatgtttctttgtatgtatatgtggagatgtatttcagggttttgataatatgaccctttacgacgacgtttttagattgtagtaaatttataaactaaagaagattagtgttaatgaagaacaaatataagtggagttggtcaactcatgagtcatgttagtgatggggacagagtaaggtggtgtgttttgtttcttattacaacaaatttctaaatttccaactacaaaccaacacatacatacacttatatgttaacgtaaatatgtatggtgacatcacttataaatgttatcatcttttgtggtttgtggattcatgatgatttcatatttgaaactttctaaatctgattattttaggcaaagaccaatgacaaccttatctgtaactgttagtctctagacccaccaagaacagtatctaatctatggttgtgcattaactttatgaaaagatttttgtcgttcagatctttattttctggctaattataatcaaattgtgacgatcccatatattctggatgagacaacataacttaaaatatcagaaatattttatgaaaatcatttttttagaaaaagctaaaacgttaacatggaaattagttacgagtaccaaatatttaaatgctggtaccattgtgtctttgaatgttctctaataaataggtacaaaactgtttctctttttaaactcggattagtagtgtagtggcccaattctatgtagatcgggagaagtccattccgtaacatttcgatgcgtttctaccgaaactaaccggattagccgatatgatatattaaaaaaaaaattctataatagacaagtataaaactgtttctttttttagattggtcaagaactcgaagtgatttttgtatattaaaaagtaaacctaaacctatcatcccctctccatgctctgatgctcatgatctttcgttgacacagacatatagacaaagaaacaatcttacgtacgagatcctctttcgaaatgtggtcaacaaaagaaacgaactttcttttttctttcttttttttttcgtgccatgagattccttaccaaaaacttactacccaagaaacctttccaatcgcataatttgtgtctaaaattcttttaaataatataatcaatctcccacttctttttctttgtgggatcgagtacgaagaacgtaatgtaagtggaagactaaaagtgacaacaaagaaagatatatatctaaacatctttaagttcttctttttctttgttgtcattcatgaagacgtatatatcttacgttcttgttcaatgtaacaaaattgtaaccaatctttggtaatgccaaaattgttaaaccaagtagatccgaggccaagaacacagacatttcgaagaccaagtagctagagaggaacaactttttgaaaaggaattcatgtaacaaaataaagaaaatacacgtagagcttagtctcaacactcacgacaacacagtcgtcgcttactgaatctgagcacaaaacattacactttagtttatcttttattttttggggaggtaagtcactataatagaatctgtggtcctagaaaatatttaagaatctttggttctttttcatcttccaacaacagtggagtttcttttgcgcttttagtttgtttttttctttcactttgcgtattatatcaagaatcatctcaatcttttgtctgtatctttctataaatgtgtgtgtacgaagtacgagtgtatctgagaccagaggatagtttttctcctttctttctttttcgtttcgtacgacaattggtttttctttcttcggaaagtgtttattattaaaaaataaagtttttcttttttgtttatcctttataacatgtgaatgttagataatatgcagaagaattagccatctcctttttttagatatatgcttgatgcttctaatcctatctttaacaataaaaacattagtcaatgcgaataataatattttttagatatatatatgcttcatgcctctttttgaagccattagcgtcaaatggtttcccattgagaataatttggacgccttttctactcacgaagccatcactcgacacagcttttactcctacatcgctagagttttgtgcaattagaatcgctaaaagcacaaaaaaacacaaacacttcatatctttttctattttctttttgtttttgttctcttatcgttttcatttcaacgagtatatatatagaaggcataaaaccacccccaacgtttggctctatgaaagtcccttaaaaaccagaaaataatatattttaatcttataattatattctaacttctttttaatatagactgactactaataaaagtacacgtgtttattttttcgtgagactgtcccttagataagagattttagagtttctctcctaaaacttttaccttttagttatttttcttttttttattatcagggactatgttaagggaccaccgttggtggtgctctaagtgttttcttacaattgcaatgcatgaacattctaagtcgtggattttcgtaattatatgcgtgacatccataatatataagaaaacaataaacaataatttttacatatagttattaaaatataacaattattattacaacacataaaagaccaattagaatttatttttgagagaatatcaccttttatggtctagttattttgtaatctttatttgaaaaccgttcattgactaactttcattgtggtcaacatgttgattatctttctaatcaatactggctaaccatttttattcttctactgaccttctttggttatttccccttgacataagtcagcaaactttatgatttgtttccctcgataccactctaatttcaaaattcagtggtagctcattccaattatgctcattttagtgtaattttttagaaaatatataaaaagtgattatagtattcaatttgacttttaaattaaaatatcttaccaattttgatgttccacttcttatattctatagagtataagaaaacccatatcctttgccaaaaacaagaaagaaaacccttatttcgttcagcatttcaaatttccatttaattctcaattttaatcgtttgaattttcttctaaagaaaagatacatgtcattttgtcaaaatttatttgctatctattaaagtttgaatttcttctaaattgaacaaaaacaagaaaatatattctaaaatgaaattcggggaaatattcaaaaacattgtttcaacaattaatattaatttatcgtattattaggtgccgtatattatattacattctagtatattatagtttaactatttaaattttaaaaatgctaaacagaaattacatgtttaacacaaacacaaatgttaaatataaacacagaaaatataaggttttgtttaaacgctaaatgcagagtctatagaaaacatacatacaaaaccattgaagccaacacaaagaaaatcgataactcaaacacagatacaaagctaaatgccaatgttgaaaaaaaaaaaaaaaaaacgcataatgttaattatcttgaacgcaaacacattcaaattaaatgtaaaaatgcaaaagcaaacaattaacgctaatgcatacagcatacccaaaaaaaaaaagaaaatgccaaactatatcaacgttagacaatagctctaaatatactccttccgtcccacaaaagtaaattttttaggaaaacattttgtcccacaaagattgaagttttatatttccaatgtaaattttaaaactgtttacccgttttacccttattaaataattagataaatgattataattatttttaaatattattaagaagttaaaattgttattatacactattttttaaagaatgtgaaatttctaaaaaatctatcttcatgggacggatggagtctatgttaagagttaagacatcagtttcaatatttctaaacccaaacaaaaaacctaaatgcaaacgcaaaacctataatatttcttcttctctttttcaatcaaaatccacaaaagcaaaacaaacaaaaaagcacaaataggctcaagaaaaactaatttggaagtggttagaattttaagattgtttatacgctttttattttttttatgaactggattgtttatacgtcaacaataacaaaaatgaaatatgagttttccgtttataaaacttctaaacgtgaagctattatctggtcccctcgatatgatttttgtaggcaagccactacgagaactttacttatcataatgaggcccaataagcagaggcccactgaagacctatattactgctgacttgttagatagcctatgagcagagttgagatcaagagacatccaaatatagttttggaatgtataaaaagttggatatcatttcagtatataacagaattttattttatttttaccattgcttacatattgtttttgtttcaaattataaatgctataaagtattacagaagaaagaccttatttaaatgttagtttttgattttgctgacttaactttactttcccttggtcccaccaagcaaacccatctttcgtctctgctcacttataatattaaccgtcgacgatttgtcactaagtataatggaggagggacctgcaaagttgctcacgccttcgctaataacctcccaaaacaatgctcccgcggccgagccgcctttttgcgtagatatcgtaaatgatgtcatatgttgtggtgaacacgtcgtctctattagccagagtgtagcgtggtgtgtctgatcctaacccgaattctgctagaattacaggttttttaagattgttttgcgcatcttcgatgtggccttcaagccatctttttatgaaggccaatcgagagttctgatccaacctttgaaacctgcgcaaaaccaaaaagaaaaagctcaatggtagtcgatttgtaaaccctaataacatattttttatatatagaatcgatgttattgtttatagctctgacgtatatacgtttaggataaatgaatatatgtagttttacatactgatatggatataaaacaaaattttcaattgctacttttgcaaagaaaaactagctcggaagataaatcccaaatgatagcatgggtggattaaagcaaaataatttttttcctaggttgatgtgttaaacaaggaacaaaaaaagagagcatgaatactatttctgaaagattgttttgtctaaatggatgtacagtataaaacttagtgtgaatatgtcagttgatcataccataagtcacttccacagtgcatcgatgcgaaatcaatggcatcgatattgtgattagctatgaaatcagctccaactgtgttggctgaaactggatttagtgaattctttctttcaggagatgagtcaccatagaaaccttcatgaccagtagagaggagatggtttggatcaactgattttacaaaaagagccatttcattaatccaagccataagggtttttccacttctatccacaccgcatcgtggctcgttcataagctgccaagccatactggctggttcatctttgtatgcaactttagtaaatgtattcactctgttcaacatagtctacaaatagagataaagatatcatgggatatataaagggataaattatggtgtaaaatttatttttgttacgaatcttgagagattaaagaagatatatatagattttggttaatttgtatcttttttaccttgacgtggttcttgtagaactctttaataactgggtttctgtagaaatcgtcattggaagataccatttcgcctttacttctagcccaatccacgtattgttttttccctccgtagtcatcccaattattgacaagggggattatcaattttataccgactctttttgcttcggctatcccaaaatccaaacccttgaaaaaaagaagacaaactaattaacaaaaagtaacatatatttaggttgaaaaggcttcacacttacctgaaacgtttgttcatcgtaggaaccaggggctgtttggagagcgcggtatatggcgccattgcggaacccctaggtgcgggcgatcgtcaaaccgagactagttgcgttttgaaacacattagtgatcttaaatcttgtggctggatcggtagcttcgtacgcgagccagtaggcattgaagccattagcgtaaaatggtttcccattgagaataaattggacgccattcctgctcacgaacccatcacttggcgcagcttctactcctacatagctttgtgcgatcacaatcgctaaaagcacgataaaacacaaacacttcatattcttttcgactttctttttgtttttgtgctcctatcgttttctaacgagtatatatataaagggcatacatgctttcttacaattgcaatgcatgcatgaacattcactaattcgtggattttcataattacacgcgtgacatccatagtaaataagaaatcatcaatacattcttcttcttcttattactatgatttattacctacaataagaacatcctagaatatatatcttagataatatcaccatattattaatttaataataatctactctattatttgagacgtacgttaagtgattctcggttaaaattttttttttacctttaaatcatatgtttaaatggttaatgtcatgaaaaagtttaccttttactgagaataacttaagttacgttataatcttggccgttcgcttgaattgttttgaccgtccgatctcgagccttcacttaaaaaacacgcggatccttatgactcgggtttacaattattgggtcatacgttataatcttggccattcgattgaagtgtttgtgtccgttcgatctctcgccttcactaaaaaaacacgcggatccttatgacccgggtttacaatttttaggtcatacgttataatcttagccattcgattgaagtgtttgtgtccgttcgatctctcgccttcacttgaagaacacgcgaatccttttgacccgggtttacaacttttgggttatacgttataatcttggccattcaattgaattgtttttatccgttcgatttcgcggcttcgcttaaaaaaacacgcgcttctttttttcctttttaaaaaatatggaattctccttttaatcctggtcgttgaatagatttatttcaagccgtctgattttgtagttacatgcatatttaaaaatatgagattctccataattatagcagatataatattttgtttggatcttcttttggaattatcttacattttctccataattatagcacatctaatatttctttgtgatcttcttttggaattattttacatttctccataattctaacacatctaatatttcgtttcgattctcttttgcacctatcttacatttttttttaaatattccctatattcatacatacttttacggaaatgaaaaatatttttctataatcatcagattcttgatatcgaataaacttgaactccaaggataatatcttttgcgcatctttttttgacctaaccactcattcttataaatatcggacgccccatttcaatctactcactcagcttacactcacacagtttcatttccaaattcatttttaaaaatgatgctcgccaatcctcttcaattcactcccttgaaatcgctaaaaccttacaagaacgcttggcgtattcaggttaaattgcttcatgtttggaggcaatattctgtaaaggctggtgaatccatcgaaataattttggttgatgaagctgtacgtattatagtttcaactttatgttttcgtaaatcttatagtgtgttcaagcatcatttttctttactaattattatttaaattatttttgtcatatagggtgataagatgtatgcttctgtgagaagagagcagatcaagaagtttgaaaggtgcttaaccgagggtgtttggaagatcattacgacaatcactctaaatcctacaagtggccagtatcgtatttctgacttgaaatacaagattggttttgttttcaaaccacggtctctccatgtgataacgtttctgatgctttgttcctctcacttgctaagtttgatgtgatcctctctagatccgctaactcaaatatcttgcacagttagattcaagtttttatattagtttagaacatacatgcattatttcttatgtagaaattatattcatatatttattgtatttgtctatacagatattattggtcaggttgtcgatcggtctgaaatccaaaatcttaacgctagcaacaagcccaccaaaaaaatcgattttgcattatttcttatgtagaaattatatttatatatttattgtatttgtctatacagatattattggtcaggttgtcaatcggtctgaaatccaaaatcttaacgctagcaacaagcccaccaaaaaaatcgattttcatttgagagatcagcagtacaaacaatctatattcatattcattcttatttaaagtttgttgttttttttttactttttattaataaatttcttctttccatttttagtgacactcgcttggcatgtacactttgggggaagtatgctgagattgttgaccaagcttgccaggagtctactgatggtattgttgtttgcttaatccgatttgcgaagatcaatctctacaatggtaattatgttgatatgtgttactacatatctatactattttaaaaacacgaccttttatttttaaaacagatactaggagtgtttccaattcttttgatgtttcacaagtcttcgtcgatcacacgttggctgagttgggtctttttaagcaaaggtaattgtatttatttgtcactaaatatatttgtttctacataatattaaccaaagtatattttcttgatatatagcataccaactgatgggttaactttgggaagttctggatcttttcacaagaggctctatgcaccaagaactggggatgacgatggtgattatccaaggcaaacaatcaaggaagtcctcacattttctgatgtactattcattaatttatttatcctactaacatttttattacatttttatatttttagcttagtttgtgaattcctctttaaattcatttgaaggtcggtaagtgcaaaacagtttgcactgtttcggcaattgatacggattggccgtggtactatttttgttgtcgtgctcacaacaagaaggttgtcaaagaagaagctatcaaatttgaagatgtcaaacttcctcaaaagccaagattttggtgtgaaatatgcaatggttttgcaaaatctgttgttcccaagttagtctttatgaaatctttatattgaatgtattatgatttataatttggtatttttaatcttataatcctatttaactttaaggttttggctacatctccatattatggaccaaaccggtgaagctaaatgcatgttattcgatagtcatgcaaaggaaattcttggcattactgcccatgatttgcttgctgggtcatttgatgaggtatattgtcttttttaaaaacaaactctttcattaaaatgacaacgttcatgttataataatctgtattttttgtagatcgaagacccaactgttttgcctgatgtgatcaattgtttgaaagggaagacttttcagtttctattgtgtgttcaaagggaaaacatatttggtggatatgattcattcactgttgcccgagtctacaccgataacattgctgatgaaatcgttcaagaggactatgatgcatacgttgatccatcatccttaatttcgatcgaacaggtttgtcaaataacattaaacaattccaatcattaatatttattgtttagagttgtcttattaaaatgtttttgtattttcatataggattcccttatgctcactaatggtgttgacctttctgatgtggatttgtcgtcaacctttactccatcatcaaaacgaaaagaagatgatgttgatggaaatgatcacgcttctacaagtaggaagaagttttctaagatgaccatgtatgaggaaggctccgacgaatgatgctcaatgactacttaatgtttttgcttaaagttatgcatgttgttttatttttttaagatctaaactatttttattttattttatatttttccttgggaattaataaagttatttcaattatatgtcgttttgttaacaattttattacttaagttatactctctttgttctactaaattttatttgttatatgttcacaaattaagaaaacaaatttaatgaaatatttttatttcgctatttaagtataatattattaatatttctctcttctttttgttatttaacaattaaaatagtaatgattttaatgtagaacatcaatttttggaaatattaaaaaactcaaaacatcaactttccagaaaacaatattgttttcttattacgaatctaaagattttatattatactgttagtcatactaaccacaaacaattttactaattttgtattaattattaaataaaatcataattagcaaagattttgtacactaaataatcagtctaactaaacatacctattcctattttttcatagattcttattataataatgataaattttttttaacatgctaagaaataagtggcataattattgttaaaacctataagatcttggattggttgtagacgatttctttcctttttacacatcaattatttcaacgaggagataattgatcaatcatcctttaatttgtgttccaatttgcacaaaaatatagtagaaaaaataaatttgaatatacattccgtatattgtgccaaaatatatttagattattgatattttggttaacaatatattttcatatatattgtttcctattttttagcatggctatgtttatcatcttattttgtttctcatacatttagctttatactgaaaacaaataaacaatttttgttattttttcatcgattacaatgaagaaaagaaaggataatgatgaaaatgatgtacatcaacaacaacaaaaaacagaaaacaaaaaaaagaacaagacgtttgttcgatgaaaccaactttccttcgcataatcaaacacttgggtcgaaaaatttagttcccgtcggttctgtttttggtagagttattagtgacattaccaatgtcgatcttaccaacagaagtcaaactcctcatactcccgtctccttaccgctatacccggcaaataataatgggagttcctcacccattacgcctattaattcgttgaattcaattcttacaggtactattctcatatatcatcatcatcgtttattttgactttatattgaaccatatatttttgcacttcaaaggagacagagtattatataatacaccaaacacaagagaaaatatagtcaatccatctaatagctcagaagttattaatccaacttttacaagagctgccgcaaaaactagaaaatcaggttagtaagttatatactatttgatatacaacattatcatataaattgaattataaaaatagtattttatttatatgttatttttgattttttgtattttttaatgcagaaaatttatccaaaactaaaagtgtaccatcatcacttcgtaagaagaccaatttcaaaacaacaaacaatggtgatattgttaacaaaacaactattaaaagattgatagcttttaaaagaatggccagaaaaataaatttcccatcaggttataattttataattttttaaatatagatacaatacatattagttaatattattatttttcttaagttggttgttgttttttcaggaggatcaccggacttcttaactcctaatcaattgtttggggtagattactctggaaatgtcttatcggatataacaaatatctctggagaatccatcgtctctaccattagattaatgtccaataataaagaaaaagtatcaaatgatcaaggtttgatttatatttgatagtagctatatatgttacattttagtttgtttgtctaatgtccaatagtcaaacagaaattatgttgtttaataattttttttgttgattgttaggagtcccccattcaactaaattacaatcaaaggagaatgctacaagtattgtacgtgacaacacgctcaatgacgaagaaattgatcattctgaagctatatattctgatagtggtataatgttaatcataattttagaatgaccacctttatagattatgtatgaaattgttttatttgtgctactttcatgtttacttctgtctacagataggtcagaggaattcgatgatcatatatttgactgtagtagtcaagaagagtatgagtcagacaaagattcaccgaccgatgaagttgttggaccaaataatatgattgacatgaatgatttgttaagaaggaatttaaacaaggagtttgctgcagcagcttcgaacaaagaacatggcagttcaacaactagcagtgataattttaaaacatatattatatatattagaaacaatgaaaaacaacatgtattgatgtttgttcgattcaagttatcatgacgaaggtgatgcgaatacacatgtgtgcattgtggtgcaattttccggtacggtgaaagactaaatagaagaaggaagagtactaatccggtttatacaggatgttgtatgcaaggtcagattgttctacctatgctaaaagaatcacctgaatatatgtggtggttgtttacaagcgaccatccagatgctaaaaattttagagcaaatgtcagaccatacaacatgttgttttcattcacatctcttggtggcaaggtggatcgatcagttaaaaagggacgtggtccatctatgtttgctttacaaggagaaaactatcacttgatagacgcgttgaaaccaaaacctggcgattatgcaaaatttcaacagctttatgtcatggacactgataatgaagttgacaatcgaattgaagttatgaggtaagtgatagttttataaatgaactttatgaaaaaaaaattattttaaaagcagctaatacattgtatttattaaatgtcttttgtaattatacaaaattgcagcaaaggtaataatggtaagacggaaggtgtgaaacaaaagtttaagaaagaaacagtttcagctttgctaaagatgttggacgagataaaccctcatgttgcaaattttaggattgcccgtgatagattcaacatagagaaagaagatgcaaattttcatatgaggattatatctaaccgcgacacagatggcagagtgtataaccttccatctgtaggtgaagttgcattgatacctggagatttcgacgacaatctagataaaagagatatagttctacagattaagtctgaaaagttaagaagaatacatgaatgtcacgtttcatatctatctcttcagtatccattgttatttccaaaaggagaggatgggtataggcttggaataaaaaaaactgaaaccaacacttcaaaaagaaagaagaagcaaaaagatgttagtatgaggcagtggtttgactatcgtttacaagagagaaaagatgagaagcacatcctccttcgctcaaaacgcttacttcaacagttcatagttgacgcttttacaatgatagagtctaatcggctaagatttatcaaaaaaaatcagacgaagctgcgcagtaccaacaagcaggcagttcaagatgcttctgatgctggagataatgatctttctaataaaggaaaaagtgttattattcctccatctttcaccggtggtccagcttatatgcaacagaactacttagatgcaatgggtacctgtaaacatttcggctttcccgacctttttataaccttcacatgtaattctaagtggccaaagatcacaagatttgtaaaagagcggaagttgaatgcagaggacaagccggatatcatttgcaggatttataaaatgaaactcgagaatttgatggatgatctaacaaagaatcatatctttggcaaaaccaaattaggtactacattatttcaaatttagttacatatatttcatgaatattaacttacaagtgacattaactcataattattatgttgaaacagctacgtatacaatagaatttcaaaaaagaggtcttccacatgctcacataattgtttggatggatcctagatacaagtttcctatagctgatcacgttgacaagattatttttgccgaaattccggataaagaaaatgatccaaagctatatcaagctgtctcggaatgtatgattcatggaccatgcagattggttaatcctaattcgccatgcatggaaaacggtaaatgttccaagtattatccaaagaaccatgtggagaacacgtttcttgacaatgaaggttatccaatatataggcgcagagatactggtcgtttcatcaagaagaataagtatccttgtgacaaccggtatgttgttccatataacgatttcctattacggaaatacagggctcacatcaatgtagaatggtgtaaccaatccgtctctgttaaatacttattcaagtatgttaacaagggacctgatcgtgtaaccgtctctctagagcctcatcgaaaagaagttgtctccgaggaaaacaatgtaggagaaacaaataatgatccacaagaacaaaatcaagttgaggattattttgattgtaggtacttttccttattttatttcattttattgtaaatattcttaatagactattttaaatataaaaattaatggaaaataactcaaatatcgttttacagatacgtatctgcatgtgaagcgatgtggaggattaaagggtatcctatacattatcgacaaacattagtaactaaacttacgttccatgagaaaggcaagcaacctatttatgtcaaggaaggtgagactgctgaatctgttttgtatagagtgaacgatgatgaaactcagtttactgcatggtttgagcttaataagcgtgatccggaagcagcaaaacttttatatgaacaaatacctaatttctatacgtggaatggtaaagataagaattttcgcagaagaaaaatgccaggttttgttgttggtagaataaatcatgtacctccaaagatagatgatgcatatcaccttcgcatccttattaacaacataagaggtccaaaaggttttgatgacatcaaaaccatcgagggtgttgttcataaaacatacagagatgcatgctatgctctaggtttgcttgatgatgataaggactatatcaacggtattgaggaggctaatttttggtgttttcataagtatgttcggaagttgtttgttattatgcttattttcgaaagcttgagttcaccagctgttgtatgggaacacacatggaagatactgtctgaagattttcagaggaaagtaagagacaagttaaaatgtccaggttagttaaattatttttaaaaatgttatatacgttttttaaaatgttattttacatattttattacattcatcctaatattataatgtatatgcagaatacatattgcctgacgaagacaggattcagttatgtttacaagagctgcaaaaaatattgaaacgacatggaacagatctttggaggaaaagatgttgccgcagcttaaacctggcgatgaacctgcctttaatcagttgatactcgatgagcgcaactacaatcgtgaaacattgaaaacaattcatgatgattggttaaagatgctaactacggaacaaaagaaggtatatgataaaattatggatgctgtccttaataacaaaggaggtgtttttttctaatatggttttggaggaacatggaaaacctttttgtggaaagttctatccgcagcgataagatgtaaaggagatatttgtttaaatgttgcgtcaagcggcattgcatctctgttattagaaggtggccgaactgcacattctaggtttggtattcctctaactcctcatgagacctcaacatgcaacatggagcgtggtagtgatcttgctgaattagtaacagcagctaagttgattatttgggatgaagctcctatgatgagtaagtactgtttcgagtcattagataaaagtttaaaagatattctatcgactccagaagacatgccgtttggtggaaaattaattattttcggaggtgattttaggcaaattcttcctgtcattcttgcagccggtagggaactgatcgtcaaatcgtcactcaattcgtctcatctttggcagtattgcaaagtttttaagttgaccaagaacatgaggcttctccaagatatagacataaatgaggcacgtgagattgaggatttttcgaaatggatccttgcagtcggcgaggggaaactaaatcagcctaacgacggagtaactcagatacaaattcgagatgatattcttatacctgaaggagacaaccctatagaatcgatcattaaagcagtctatggtacatcctttgatgaagagagagatccaaagtttttccaagacagagctattttgtgtccaaccaatgacgatgttaactcaattaacgatcatatgctttccaagctaacaggttagtgaattaactttgaactactagagtagatgacaatgaactactacactttgcaggtgaagaaaagatttatcgaagttctgattctattgatccttctgacacacgtgctgataaaaaccccgtatatacgcctgattttctcaataaaatcaagatttctggattacctaaccatttactttggttaaaagttggttgcccagttatgttgttgcgtaatcttgattcgcatggaggtttgatgaatggtacaagacttcagattgtaagacttggagataaactggtgcaaggacgtatattaacaggtactagagttggtaaactggtcattattccccggatgcccctaactccgtctgatcgtagattgccatttaaaatgaaaaggagacagtttcctttatctgttgcatttgcgatgacgatcaataagagccaaggccagtcattaggcaatgttggtatatatttaccgaaacctgttttctcacatggacagttgtatgtcgctatgtctagagtgaaatcaaagggagggcttaaggttcttattacagacagtaaaggaaaacagaagaatgaaacaacaaatgttgttttcaaagaaatattccgaaacctttaatagattattttttcaggtatgatttatttattttgattattataaaataaatatcattgtaaaaaattatataacatactaacttagtcgtttttatatttgcaggttggaataattaataaaagcatttctttggttaattttcttaatgcaagctttttaataccagtggagaattatgtaatctattctttttttattttaatttttttattatgagttttaaatataaataaagacattttctaattattttttgtcaaaatttataaaatagagtttttgtggaaccgaggaactacatatacaaaatatacaattacgtacccaaacatacataccaactatagacatatattttccatgctacaaaccgaggaaactatatatactaaacaaaatatagtttgaccagactaaatatattgttcatgtaccaataatacatgataaacaaatacatgtttaaagataatgaaaataaaatagagtttttgtggaatacacagaactgagatttgattattgaataaatcaaagataccgtgcgtagcacgggtactggcctaatgtataagttattttgtaatctttaactagaagttgttaattatcttcctaatcaatgtgggcttaataattgggcctatatttttattcttgtaatcactatcattgttcttttcccattgatctcagtcagcaaagtagataaaaataatgttattttcatttattatatcagttagatttatataaatttcaatttccagtagtagttaattctagttatgctcatttaaatgtaaatttagaaaataatagtaattttaactaaaataggatttttcctaccatttttaaccatccatttcttatcatacactaaataaaaaattattagggggcgtcaaaatatgacccatgtttggtagcattccaaaatttacatgaagttctgaaactttaatcctttaatcttttgtaaagaaaacatagtgtcaaaatctactattcataaaattttaaatttattctaaatcaaacctaaaataagaaaatattttctaaaatgaaaattgggcaatatcattgaagacattttcttaaaaaaagaggtcaatataaatgtgattgttcatacttactcatagggagaagccccatacaatggcactgccaagtagagaatatgaagcagtagatgatgggagttgttgtggaagttgccactgaatgcaaacacgagaagggccgttgaataaatcattcccatcatattttcaaatattgtttttagtctctactcttaccaaaaaaaataagggttaaaagattttcttaaaaacaagaaaacaaattccgatcatccattcttaatgaattactcgctcttatcttatttttttaagaatacttggatcgtaattgtagcatattgagtttgaatttcttccattttgtaagtattttttttgttgggcttctgttttaaaactatctacaaatataatgatgatatatttttaacaaaaatcttttggatctacataatgcaaaagagcttttggttattttctttagtttttcatacttcaatggtaggctatctctaatgggattctctgaaaaaattaatatattaaaattatttaattttatagaatttaataaatattgcaaatcataaaatattaaatatatataatttttatttttcaaacattttaaaatagatgtaaaaaaaagaaccggaatttaagtgttttggttctgtaaacttgtggttatgttatttggttcttaaacttgtttttttttttcctaaacttgtggttaagtgttttgcttcttaaatttgtagaagcaaatttctggaataaaatttgtggttatgtgttttaagtgttatggttaaaatttggttcccataagtaatcaaagctttcttgatttgttgaaccatgtgagctttgacaactgcaatgttatctttaataaagaatgataaagtcatgaagatatggaataataataaccaaaaagccgaagataaattggaaagggcttagtttgaaccaagttttaggaattacaaatcacattttgaacagagagtattatagaacaagaaggaaatcatgaagataattacttggaaactttattcttccctgcaatggcaaaaattgtgggatctgtgaacaatgcacacattcttcatcacataaataactcgaataggcttaagagtctggacttagaggatattactcttccgtgttcaatttataaggctgcagaataaaacagtgaaagaagtagatgagattcataaaccaaatatcaggaaatcaaattcttatgatcaaatagaaaatctagttgtctgcactcaccaaaagcatagagtgaaaaaaaaaaacaattagcatttaccttaaaatttccaaattgtttcaatcacatattcaataacatatgcaaactaatcacgactcgtttttatgattgaaaacagatacaacaacagattaaattcaagtttgagaaagccaaacgatttagattgatctatctatcaatattgccaaaacgtaatcatacatacctataaaccttaaatgtaatcatacaaagtaaaccatagcctcctaaatgattcagatttgcaacaaacgaagaaccctaatttacaaaacgtaatcctaaaatttgttcaatccaaaaactctaattttggagatttaaccacaaaatactttatctcgaccaaccaagcctaaaataaccatgcctgtttgcggtttggtttttggtcagtcgaaggatgagatagaactagtgaagaatggaaagaggtttcgagtggggaaagagaatgtcagcaaatcatggggtattgtcaggataaataaggatggtggatcggagggatcaggttttgctaaggatcagttggcgatcgaagttttttcagatggtaaagctaaccattcggcttcagaagcgtttatccaagagaatccgtcggcgagtgggacgggaaatcggactacataacggttttccccagtttttctaattcgaatttgtaatcaaatgatgaattacttaatgtggaattgtcgggggcaaataaacctaatttccgaaggtctaaccgatacatattgaagaaattcaatacggagatcttagctgtttttgagacacatgcgggaggagataaagcaggacgcatatgccaggggttggattttgagaactcattctgggttgatgctgaagggcagagtgggggactgtgggtgttatggcgtacatgtataggcgatgtggtgattgttgagttcgcttatcagtttattcacgcaagagttgtaaacggagatgcagctgtggacctaatcgttgtttatgctcctccaacgccgagtcggaggagtaagctttgggacacgctaagtgccgtgattcggggagtaaagggaccagttattataggagaggattttaatatgattgtcagagttgatgagagatcaggaggaagtgggccactatctcctgattctattgcctttggagaatggataaatgattcctcactgttgacatgggtttcaagggtaaccaattcagttggaagcgggagcgtgaggagagatttttttgtggctaagagacttgatagggtattgtgttgttcgcatgctcgattaaaatggcaggaggcaacgttaacacatttgccctttctagcgtcagatcatgcacccctgtacttgcaattggcgctgggagttggcaagaataggtttcgaagaccctttaggtttgaggctgcttggttgtcgcatccagggtttaaggaactgcttttagcatcctggaagggtaatatcccaacaccagaagctttaaaaggaatacaaacaaccttgaggaaatggaacaaggaggtgtttggtgatattcaggaaaagaaagagaagttgatggttgaaattaagacagtccaagattcactttatagtaaccaaacagatgatctgctacggcgtgaaagtgagctaattatagaatttgatgtggtacttgagcaagaagaaacgttgtggctgcataaatcgagggagaagtggtttgtgcaaggagatagaaatacgagtttctttcatacttccaccattatcagaagaagacacaatagaattgagatgctaaagaacgagaaaggtggttggatctctaatacaaacgagctagaaaagctagctattgattactacaagaggctctattctcttgatgatgtggatgaagttgtggagaggctgccagcaggcaggttcctgggacttaatcaggaggagcaaattaggctgaataagccattctcggctatggaagtggagagtgcgcttaagagtatgagtcgtttcaaagcaccgggccagatggatttcagcctgtgttttaccaacaaggatgggaggttgttggtgactcagtcactcgttttgtgttggacttttttctgtcaggaaatcttcctcaggagacaaatgatgcgatggtggtactcatagctaaagtaggcaaaccggagaaaataactcagtttagacccatcagtttatgtaatgtgttattggaaatcattactaacacaatggtggagagattgaagagtgtaataactaagctgataggcccttctcaaactagtttcattccggggaggcttagcacggacaatattgaaattgtggaagaggatgtacactccatgcgatgtaagaagggacacaaaggatgcatgttgttgaagtttgatctggagaaagcatatgatcgagttaggtgggacttcttggaagacaccttggagattgcaggtctttctaatacatgggtctgatggattatgcaatgtgtagagggaccatccatgagcttgctttggaatggggaacagaaagagctgtttaaagcaaggcaagggttgcggcaaggagacttgttgtccttgtatctgtttgttttatgtatggagcgcctgtgccacttgattgatggagcaatagcaggaaaaaggtggaagcctatatgtttatcacagtcggggccaaaactgtcacatatatgcttcgcatatgatttgattctcttcgctgaagcttcagtagctcaagtccgagtgattcagagtgttttggaaaagtgttgtattgcgtcgggacagaaagtgagtcttgagaaatctaaaatctacttctcggataatgtttcgcgagagcttgggcaacaaatcagtaatgagagcggtataaagtcaaccaaagaattgggaaaatatatgggtatgcccattttgcaaaagaggattaataaggcaacctttggtgacatccttgagagagtttcaactcggttggcagggtggagaggcagaactttgagcctggcgggaagagtgacgctcataaaatcagtgatatcatctattctggtgcacactatataagtgattaagcggccacaatcgactttggagagtttggacagattagccaggaatttcctttggcaaagtatagcggacaaaaagaagcaacatttggtggcctagaaaagagtttgtttaccgaaatgggatggtgatttaggcattcagtttgcgaaagaaatgaatatagcgcttattgctaagatagggtggcgagtgcttcatgatatctcaagtctcttggtgcaagttgtgagaaagaagtataaggtgggattaattcaggatcagtcttggatggtggcaaagagtaattggtcctcaacatggcggagtgtgggaattgggatccgggaagtagtgtatccgggctatagctgggtcattggtgacgggcgacaaatcagattttggagggataagtggttgtcatcaacaccgttactggatgaagtgataggggatctacaagagggatatgaatcacagatggctcatgatctgtggaatgatggtgctgggtgggatcttcagcgcatctctccgtatgttacaaaagtgaagcggctggagttagcgtccatagtgctggatagggtcactggggcaaaggatagagtttcttgaagcggtaatgctgatgggcggttttcagttaagtcagcctatgctttactaacacaagatgactcgccaagacaggatatacgaactttcttcatgagagtgtggagagtggttgtgcctgaaagagtaagggtatttctctggttggatgcaaatcaggtgatcatgaccaatgaggagaggaggagaagacacctttgtgacttggatatttgttaggtttgtaagggaggtacataatctgttctacatgtgcttcgtgactgcccagcaatggcaagaatttgggctcgcattatgccaataaggtgaagacatgctttttcacgtagtccttgtatgaatggctctatgagaatttatgtgaaggagtcagaactaaggatgcagtctgggcaacggtttttgcagtggctgtttggtggggatggaaatagcgctgcgggaatgtgtttggtgagcaacataaatgtcgagatagggtccgttttttaaaggagctggctgtggaggttagtgtggcgaatgagacgaaatcagatggaggtatcagggagaatcgagtcgaccagcagatcgggtggcgggtacctagtgctggttggtataagctcaatatggatggtgcctctagagggaatccgggtttagctgctgccggtggcgcgttgcgggatagtaatggggagtgatgtggcgggtttggggttaatattgggcgatattctttaccgttggctgagttgtggggtgtctactatgggatgtacacagaattggagaaacgggtcacacgactaaagttggaagtagattcagagatggtggtagggtttataaggacggggataggagaggctcatccgttgtcattcctggtgcggttgtgctatggctttttggttaaggactggacagtccgaatttgtcatgtgtatagggaagctaactctcttgccgatgtgttagctaactatgtgttttcacttctgttaggagttcatatttttttttctgttctgctttgtgttaagacgattatgagggatgatgtcgacggaactacgtttccacgacaagtccgtgtttgagctgttttagtttaatattaataaaatccggggatttagtttaatacaaacttcctataactaaactaaaaaaagaaattcaaactcaatatgatgcatattaaaatttagtagttatctaggaaaaggaaaaatatatatagttcaagaaatttaaacattaaaatagatatatatgtttctaaaagtcccaactattagttagaatgaaaaattgtgatgaaaaaatatgaatacaacataacataccttgtgaaaataaaaaatttaaatgaatatatcaattcttttttaaaagatactttttcaaattattgaaaaatatattttacaaagataacaagaaaaaggcacaactataaaagatatttcttcagggtatagtcttagcaatctgatatctctttataaaccaaattaccaattttgaattaatgttaaagaacaaaagtgtggtaaatatctaggaatatggacaaatatatagagttaaacagataggaagatttatattgacactaattttcttaaaagatacaactattggaaagaaaatttgtgatgaaaaaaatacaaataaaatattgtgaaaaccacaatttttaatgactagatacaattttgtaaaggattcaactctagaagatattattttccaattattaaaactaaaactaaaatatttaacaaagacttataatgaaaagacacaacgatataaggtatccgatttggataaaaactaattaacaatatttttgtaaacagtagttacgatgaaaagacgcaatctgttgaaagacacaattttaaatgactagatgcatttaaaaaaatacaactataactatagaagattttcgctctgattattaaaattgaataaaaatattgaatgaaaagaatacaatgaaaagatgtaattatatatgtattagcataggtgaaacctaaatatatggaagtatggaaacgctgattttctggaagttcaacaagagatttagacgcaaacaatatattaaagtgtattgaaagtgaaattttaagagatttgtgtagaacttataaatcctatgttgttcaaacatggattttaaaaagtcccatgaaatccagtgttgttaaactaatgatttcaaaatccaacttaaaatctactattattgaaaataatttatggattttgattttaatgattttggaggatttaaggggatttgagaggatttccttagttaaaaatacagaaatctaaatctcatggtttaaggtgaaatttgaatggattttacaaaaattatataaacttccttaaaatcatccaaatcatttaaaaactcaagaaaactcaaatcactttaaattctaatttgaatacatccccctaagtgctttgaggacatgatcaaaatcactaagagcttccttttgtgaagcatttatgtttaggttaaatgttattctttcatttaggcggtctaccatttaaaaccgacctgtttgccagttcgttcagcataatttgatctctacctcgattttaccttggtcattgtctatatcaaattactttatataaaatctaaacacggagagaagagaaaaaaggaaaaacgacaagaaaaaaatattaatatgcatgtttgataaaatataatttgcataaagtttttaaacttttaaacaaaataagcttaactcacattaatttagggcatctagtctgtaaagaactcactaatctttgattatatgggaattttttggtaaagctttcatttcaatatttacttttccgttttggattagtcactaacaaatcttgctggtttgtcgtttttcatctagtccatgcgtaagtggaaaagacaaaccagcaaaacgactaaacgagacatcgttagagaattaatacaaggtccatgggcttaacttttaaaaccttttgtgttctgcttttcggttatatctcaaacgaacttgctcggagaactgttttgggccttcatatacgacaattatctggatataaataaaatacttcaaatttgttacaccacttaatacttttaatatctaggttgtacatgatatatgaaaatgtatattagaattatgggtgtgagtaatttatctacgttatttcttgcagataagcaaaaaccaacaaaattgtgaaaattcaaacaaaaactaattattttctgtgaaagagttcccatgttgctgtcatgtgtgtctgatccatttccctctttacagccaaaataaacaaacaaacaaaacaatttcatcataaaattttaagacaatttgatcaaacacattgaaaatcacaatgtgaccaataatggagaagttgtctcgaaggagacgtttcatcagtcatcacacatgccatgatagacctattttcatttacaccactttgattcatgacagcattcagtagtacatttctttttatataaccacaaaaatccaagcatacaatacataaatcgttcaagtttaagaaaatactaataataataataaaagaaaccactcattgatgtgcaattagtaaaatcaacctttcccaagcgtggttttttgtttgaactcaaactttatatgaataaattcttccttttttgttgtaatgaatttcttctgtacggaattcatttcctatttttacagtggtatgagagtagcgtccaacgtaacttaaataaaaaagtttttaatgtaaacatagttttagtatgccaataatcaccgaagcatgcatgtagctaagtagataatgggaaatgatttcttatagatggacaataataatcgagaacataattagagaaaaatacatatgttaatcttcatgttgaaaaacaaaaccattaaaataatcaaacaccctttgctcgaggcataaaaaaacctcaacacaaaaaggaaagaaaactataatcaaatccaacatatacaatcaacttcaaaaaattacttctttttatgagacctactcttgttttcactctttttcttctcttttttcctagatataagattaccaatattcttatcatctatacgatgactataaacatcattactttcacctttcccattccttagagcgagaccttctctacgtttacctctattgctcgtttggtgataacttggcccggaagaagcatcggaagccatcgaatcatcgctgtctttgttgatttcgtattcattcgcatattttctacgatctttttcgatgatatgcccttcataatagacctcatcaatcacctcttcctcttcttcctccatacgcgaagaaatatacgtggtccatccggactcgctgctgctacattcttctctctccatggatgactcaagaaccctaatcttgagagagagagagagagagagagagagagagagagagagagagagagagagagagagtgagagagagagagagagtttaagttgtagtgtttttgcttgtataatggaatgtatatataagtgtcccataaataatatgtaattgcatgtgcgtggaagaagactcgtgtgttttcatttgtttaatacgctaaggacagcttatgtctaacgtataaagttatttccgacataactcgaagaagaatagctgttttttatgaaaaagggtttgtcttctataagttatgatttatgtgtagtcttagtcttcgtaatagtgtgagcatgttgaaaaataaatgctaattaatataattaatgtgtttcggttagagaaagtgaagtggtttaagttcacattgtggcatgagggaaatgtatctttacactaagaattctctgtaatgaaaccaaacacgcatgcatctttatggagattggatgtttgattcaaatcaaaccatgttgtcgaacatgttaggatcatgcatgccccctcttatttttctctttttattctcatcagattcgtatatatagtgtataaccaattattgataagtttgataaaatatttatatcatatttttgtggagaagtgttttatatcatatgctctcaaaaccgttttagtggaacaatgggtgtttttttctttaaattatgggggaatgcaaaattaaaagtggttctttctttaaattatcaaacaagtatatcttaatttttcttataaggacttttgttttattttctggaattgcattgttctatctttgcaaattatatttatagttcatgattaatatttaataaaatttcttcgctgggttttagatgaattcttcacagacctggtgaaaatggtgtattccctaaccgaatggtcagcgttttcaacatatttggaggagtttttgatcgacaagaaaaaattcactatattttctttatctttaatatcttgtactgcaaatgtcaaggtggattatttggcacgaaaaaatcatgttgaaccgctacatgttacttatgtaaacatttttccgtatttttagcttgtctgagccttaaataatatctcatgacagaataaaaataaaaattaatgagtgtttgtgtaaatgacaatacctaaatcgaacaattgagattagtttttataaagacatgaggtcacataaagctaaagaaacacaattgaagatagttaaacactacagcacaatctttgtaaatgattataggtttaccgggtagaacacaaattcgtctcgccaaggagagaagcacacgttttgatcaatttgtaaatttatggacattatatgcgaagtggaattttaacttcgatgagttcaatgttaattcgttttactttgatgtgaatatcgcctaaagtcctaaactattgtcatgttgtatatatacatatatttaataaatttaaaatttatccaactcaagttcctttgaattttcattagagctttaccacatagcaaaattttcctcgatgcaaactaaacaactcgtgcatcgttcaatctcagcttctattatgtataacacaacaattcagtaccgtcttcggcagtgatcctaataagtattgggtcttttctaactccctttttaatatgatgatatcctctttggacttacatgttcaactccacaaattattattggactctttctttaaaaacctcatactagttgaagttggagttggcttatatattaaaaatttctttttttaacttccgatataagacattggtttgtacccaacaatcaacattcacaatagtaacattagactgaatccccaaggtaatacacccacgctcacccatgatcaaatatagctgtcctagaggacacaaactattataccaaaaagatatgcgtcatcacttcgcacctccatcttatgaaattcctttgtttagtctctatatttcagaattttcctctacatcaaaaatttcattgtgatgagcttgttttactgactttgatactagatgtgtctatttagttcttttaaaaagggcaacaagattaatctcatgatcagaagagtggatatgggccacaacccggctatatcattaatgaaatggttagttggcttaataaagtgaaatttatttacttatgcaaaaacatgatgcaaaagagccaagtgtaatttaaagtttagatactttatccactaataaggtagttttctaagtaatgaacttaaattaaattactcatctgctattattttttattactcttccaattcttaaaatgaggatgcttctacatacaaactattttgaattgaattaacgaatttagagaacaaaacttattgatgctacaattgtctaataaatgtgtttcatatatcttacaatgagacttacacatctatatatacagtttagacacgaagactagataaagaaagaactatagatggtaagaggagatatgatggtattgaaggcatgatctaatcgtatctgtgacatgccccctcaagatagagggtctgatgttacttcaatcttgtctctcagctcaagaaaccgttgccgtgtcaatggttttgttagtgtatccgcaagttggtctttggtgttcacatgagctactcatagaagaccatgttgaacttgttcaaaatgaaatgtatgtcgatggcaatgtatatcatttttgaactaaagaccggatttgcagagagaaaggttgcgcctacattttcacagtacatgaccggttatgatattgtagaaatcccaagttcagtgagtagattacatatccatcttatttttgcagctgtgttagcgacggaacagtacttagcttccgtagacaatcgtgggactccattttgtttcttaactgaacaagatataaggtttctaccaagatagataatataagcgcccgtggagacacaatctttggatttcctgcctagtcagcatctgaaaaccatggagattgagagaatttgttctagattagaaaatcccatgtattggggtacccaccaggtatcgaagtattcattttgcggtttccgagtgatcctccgttcgtcgatgcataaatccggataaccgattgagagcataggcaatatcaagtcttgtaaaggagaggtattgcaaactacttacaagcttcctaaggtttttggatcggagagtagagtgcatgttgtaagggtcaacttgggagaagatgccattggtgtggagacggcttttgcatcagtcatgttgtaagtgtgaagcatatccaaaatttacttccaatgcgataagtgaattggtgtggagacggcttttgcataagattatgttttcatactcaaatatgttgtttgcttcaatcaatatgtctaagtaatctgcttgttaggaataggatttctcattagggattcatatggtttaatagattgcccctttgctaggttatctatagaattcttcatctttaattatgcttaatgctagatctagagtaattaactagatcttgattccagacaatatatatgcctgccatatgtatctgtagttggatctattatttgatgagcctggtttataggtgtgtaataagaatcggcctatctactaaggtgaacaatcgaactcgttaagaatgcatatttaggttaataatttctcggcttctccggttattcttggctatagatatagggagtttcgcggaacgccaccggttattccataattagagtttgagtttaagaatggttcgataacaacctagctttcattagatctactaaccaatagtttcctaagaataccctgttcctagctctttatttaatcgtttacaacacaatcatcctgctttttcttactttgttttcttactatttcaatcatcacctgctagcttaatctcgacatttaactcactgtttgaacaaaagaactctgtgaattcgatcctaaaatactgcaattgatctcttatttgagagagtagttttaggtaatttgaaccttatcagaagtcaaccaaaatccgtttcagaacagtttatgtgcctcagatgtttgacatccggacaaagtcttccctatctcggcataagggtatctcggcgtcattggaaagctagaagagtcaagattaaagtcgaagtcgaatcgtagcaatccatgaatccgttcagaagttatggcttgaagagtgaagatatgtcctagaatcgcggttttggaaatgatcaatttaaaaccgccgaccaaagagacttgaacccgggcgtcccctcaagtcttccaccgacctctagggcgcacaaccactccttcccttcctcttgccgccgacttccatcaaccctaaaagcccaggaacttggcccatcacgtactaatctacagaatgacgcttctacccttttgacctaatgaagccctataaatacaaagtctaggggaaaccctagaggcacccacaaaataggctgcctcctgtgcctctcaccgcctccaagtcgcccttctcttgttcttcattagatctctcttttctcttcaattctctattctctacttgtaaaaggaagaagagttttcaaggtttgaatttccagagaagatctctaaacccttttctatacccatactcttttttatgcaatttcttatttatatgatgttttgttctttgagtatgtgtgagtatatctctagttaggttttaggggggtttcgaagggtattcatggggactttagatctgatttaggttggcggtttctatagttttgtttgatcgtttacactattctttctagttgagtttaatcttaatgcttgtatgtccggaacgccacctaatacttgaccttaggtatttcattttttggcaaaatctcatatgaatacttgaactaggtcaactgaataaagaactataactattgcacacccgcagagtgatagggacttatggactagaatcgaatttgaacttaatgctttgatcttgtattttgaaaccatgttagcacctactaaccgataaggcaactgagtccgcaagatattagtgataatagctgactttcacctactaaccgtttgggttagctggtcttgatagagtttcgtatgtccgagaatttggaagtaaacaaaactagccatgttatatcatctggattggaatctataccttattgattgaaccttgacgcccggagaaaacccctgatgacctagcgttttgttttacttattttacaccgctctctttattgctttctacttttattgccttttcattagttttcttttattgctttttacttttattgcattctttacttatttctaccgcattcaacaactcccactcttttgtttgtcttgatccaggtaaactaacttgaattcttctttgtacctacactccctatggattcgatcctcaaatactactccgatatactgtgcatttgcagtagtcgtgtggtctttcaggtaaaagtctaaggcaaaattaaacccacatcaatactacaacgtcaaggaccaaacgaattgtcgtagcttttatcacgggactgaacggttccatgtaattgatgccttgttgttgggagtaacctttcgctactaaccgtggtttgcatatgctaagagaaccactaggtaagaatttatttttaaacaaccatttacagcccacaagatcgaatgtttggttccgagcaaacgcatcaattttggatgacattgctactctccaatttgggtctttcattgcctgattcacggttacctgtttgggaggaattggatgggatagggaaacaaagagattgagtctgaattgaggttttctcatgttatttttcttgcaagttttcattgggtgttgactgaaagttttgacagtggaggggattgaagccaacgtagggttaacggacctatgttgtcgttgggcttgagatgaggggagtttatggctcttattaatagcacaatcagtacaaaaaagttgttaggaatctaattgcaaatgtggaagagaaaaggaagaaacaattgttttgaaaatatgagaggctggatggcctaagcgagaattccattcaactagggatggtttcgatgatgaggatgcaaagaacgaattgattgtggaaggggaagctggcactcgtagagatcactattatttttgccttggagtaatggggcccgcgagttcagatccttcacctcaaagtgagtagggaaaaatccaacagagaccttattagtgttgcatagacgatatattgatataaggtttttgtgaatgttagggacacaaagaacattggataaggataagttattagagggagggtagagatagtgaacaagtgtgtgtgataaagagatctgaaccatcaccaataagaaaagagtcatcgccatgataccgttgatgcagcgccaggttatgaaggtcacttatcatttggtgtgtggctccgctgtcaagtagccacaaatttgtaggatgcagatttcctagagtcagatttgtgcgtggttgccaaggcttaaatggggagggcaacaagccgttatgcgtcgcagattggtcttgttggaacagtgaacactttttggtactatggccaaatacttcacatagttgacacttcccttggtatcccctggtcgtttgagtctcttgtttcggttggtggtattttgatttgttgttgttgatccatgactgatttgagcgtgtgtattgcttgccttggtatgatctttggcgagagttggcaatgtttgatgaggcaggtacaacgcttaatgccgaaagggagagtgccatcaattttgcttctttattgagaagcttttcatgaacttcaataacaaatggtgtattttcacgaccttcaacttgatccaccatggttttgtagtcttcatgtaggtctgctaggaggaactcgatctcttcttcatggtcaatcggtttacctaggagagctaactgattgaacgttgttgtgagatgctgtatatactcatcaatcgatttgtcacctttggaagattgtttcagttgaacccgaatttgttgaacatgtcccttgcttgcacttgcatatgtgtctttgattggtttccacatatccgctgcagatatagttctaatgggttattggaagtcatacaagacgctgaggtttgcaagggagctcactctgggaacccctaatagtagttttgaagaactaccttcttacctatacatgatacgacggacaaatctgggtacagtcgcgcgtcttcaaattgatgagagtggaagattcaactatatgttcattgcttttggtgccagtatcgctgggattcattacatgcgcagagttgttgatgtcgacggtacgtttctccatggtagttacaaagggacgctcctgatagccatagctcaggatggtaattttcagatttttccgttagctttcggtgtagttgacactgaaaatgatgaatcttggcgttggttttttacgcaactcaaagttgttattcatggcgcaacggacctggcgataatctcggacagacatcagtcaatagggaaagcaattggtgaagtgtatccgttggctgctcgtgggatttgtacttaccatttgtataagaacattttgctaaaattcaaaggaaaacatttgttctctctggtgaaaaaagcggcaaggtgttataggcggactgattttgatgacgcgttcaacgagattgaagagcgtgatcctcaactacatgcatacctcgaaagagctggtgttgaaatgtgggcgcgtgttcattttcccagtgatatatacaatttaatgactatgaatatagcagaatcaatgaaaagagcactgtcaaaagccagaaatcttcccatagcttgactgttagaagcgataagacagatgatgacaagatggtttgctgaacggagagttgatgcgagcacgcagcatactcagctcacacgtagtgttgataaactgttacatgtaactcagctataactagtgcataactcagtcctcaaataatgataaactggtcataatgagaataactcagccataacgtatttttttttttttcatctcactaataggaacgtgtcacaacgtcaagacttatggatgtacaaacgattgatgctttccgcgtacaagtaacttatggaacatctttgcatgttgtaaatgtggatgcaaaaaaatgcacattccatcttttcgagaaagaaaaattaccatgcatccattcaatcgcagctgcagagcatatgggtgtgtctcgtatatcccagtgcagtgcttactatacgagcaattattttgtcaatgcgtacgctggtgcaatcatgccttcagatacaaaagtccatgtccctgtaattgtaattgaccaaccgtgcttgcctccaattgttgtgaaccagccagactggcccaagaaactaaggatgaaatcagcactagaagtcgctgttgagaataaacgccctaggaaggaacacggatgttctcgatgaatagaagttgggcacaatgttaaaacttgtcgtgcatagtattgtttgcacgaattgtatgtgttgtgtcttctttcccttttttggtaaccgctatatgtattcgtgacattgtagactctaagcaccgtaatatttgcaatttctttaacgtcccagctgagttatttgcaataatgtcttgtcgttttacatgttgcggctgagttatttaaatatggaagtcaaaatgttcggtcattttacatgttacggctgagttatataaataggaaagtcaaaaggttcggtcattttacatgttacggctgagttatataaatagggaagttgaaaggttcggtcattttacatgttacggctgagttatgtggttttacgactaactgagttatgtgcttttacttttgagttatatctaaccaatgttacttacgactgagctatgtgggtggctcaacgactaagttatatctaaattatgttactttacgactgagttatgtgggtttacggttgagttatatctgaattatgttacttagcggctgagttattctattatacggttgagttatgatatatctcgaaaatgaacattttgaaggcaaagacaatatgaaattcccataaatatttgtttgaaggatacaaaggaggaaaataaaagtaaacaatattttacttgaagcatcatgacccgattccttccatcttgcattaatcgaggaccatttttatctcttgcatttcttcgatattgggttcgacagtcacatctgatatggtcgaataattttggatcttcacgtgtttggggccagtatgatacctaacgatcttccaccaagtgagtgcaataacaatattgtcaataacaataatgtcattgcgaaaagatcgaaacctgctatccaagtcaaccgccatttggccaactgataacactatattttactcattttaggtgtgtatttatcatcatttagctttgcattttctcattgtatcatatcattttgcaccattttagcttattttgcatacttatgcatataggatcatcttgcatacatattgcatgtttttgtgtgttttcaggtgcataaggagcttaaaagaactctacttgaccctctactctatccaaccaggagggaagcagatgagcattctactcgatccattcactcgatccaggcagccacagaggaggcagcagttcactcgaccctcttactcgatcaaggcaacctcagatgaagctgcagattgatctactcgcccctcctactcgacccatttactcgaccaagggtaaccaactctacaagacttgttgatctatcaaagcgttttcggatcctcctcattccccactcaaccatacatctgagcatacggataggagaggaagaagcatctactcgaccgattgatcactcggagcatagacacaaaggcgcagactttgcagcaccctctctactcgatccccaagatcgagcattcgcccaaaccgcctcaagtctcttgtcttatagtgaatctagggttttcaacatttcactataaatagatcactttgggatttgtccaaaggatctagcttttatcctttagttttctttgtgtttatgaatcttaaaagcttaattactcttaatctatttcatttttgtatttagttctttaagtaaagttgtttagcttgtttagatctacatttggtatgatttcagtaatttttgggtttgtgttcttgagaatgttgcttgagtagtgattagggttcttgaggatggattagattagggtaatctctaggttagtcaggtggttaagattaggttagaacccttctggattcgcttggcccctatgcgggtttcgctggctaatgtggagattcgatcatagacgtccagagtccaaaagacgttcaaatggatgtctgatctacgaattccagagatttgtagactcgaccaagacattggcttttctgcttattggctttggtagattgtttcttaaacccttctctgctatgtttcatcaacgacagttgagattaggaagtggtagagttatggaggtctctgtcacgacaatggattgacccggtttttgaatctatcgtcaagggtatctaccttttacctgttagccacctgatgaaccctagagttgcccttatcaatgaacccatcctttgaacttctattagatttatatgtatcctctgttgattgcacttttatttacctgttatttgtatcccctgttgattgcattttagttacttaaattcgtcacctgttggttctactcgacccaatgatcgagtagggcttttaaagttctcattttcgttgtttgaatcctgacctaggattgttactagaaacccaccatcattataatctggcttgacttagttgcttctgtacacatcatgattgctagcaataacagtggactggattgacaccccctatagctgcatcgacatgttagtgtttaaggggaatcgaactgaaccacacattcaacacataagtaggcctaaaaaacctacttataaacaacagcctcacatttcaatctctccttgctgaaacatataaaacagtgttactattatacccctcttaggaaaaatacatgatgaaaagaaagaaattaaaaaggacttgatcgaaagaaattgtactatttgtccataatctcgaagggaagtcttaatctgtcaatctcaacaccattgtccaaaatatttgtcatacatccgatatcgacgagtgcaccaaccaaatcttggagtatgaaataaaagttaaaaataggcatgtcaaaggtgaaagtatgaaatctgcattagatacgtattactgaccgaccaaagtatcggtataaacggtgtcttcaataatgtagtaaaaaggtgtgaatctcttaaataaaacagtttcctttgggtcggaacttatgaccgatgttgtttccatgaactcaatcatgtagaagtgggttgttgctcggactattccaccgtttggaatgacacgaaaagttttgatttctttccattgattctctttgagcatatcgaagtaacgttgagaaaaacgacttcagattatagcttcaatttggcttccctatgaaaacaacattggagggtgagttatatagggaataagataagaatacggttaagtatgaattgtaagaagagtgaagattccattatccactcatcgacaaagacgacccgtggttcgaatgcgttatctatgaaaaaccttatgtatgttctaagaatcataacacaaatcgtccagctagttatgaaaggagacaagtcgcaaatgccgtcgaaatacgccatgatgaaattccgagtctttgaaaagtaaagaaatattttgattgtgatcttctgtttgtgagagtttagccttcggaagtttataggagcagccgtttttataggtgtattgaaccgttgttaattaggtcggatataaccgtaaatcggttagtcagtaaatcgaatggaacttcaagctttattgacaactcagccgtaatgtgggttaactcatccgtaacagtacaatttgccgccaaacacagccgtaacctagaaaactttcccgccaaacatgcaacctttcgtattcctttaaatgttttattttataattattgacaactcagccgtaacattgttacatgtcttgagtgtaactcagccgtaacaatatattttgccgccaaacttagccgtaacctagaaaactttcccgctaaacggtcggacacagaacctttcgtattcctttacctatcttttttttttctatatatttgttacttcatctcatcatttacacgtctcaccctctcttcctgacgacatggttgttcctcacattgacggacaatttatcaaagatgtcgaagccgtactcactgctcctgatcgggcgaatctcccagttctaaaccctggcttgggtacatgggttgatacgtggttcagattcaatcaccaactatctgtcgcaattggagatatactccagcgcaacttcaccatgcgtggccgacgtaccggatgattcccgttgttttcaaggcaagatggtttttttcctcacggtaagcatcgagttttgttttaaagcacttccagtaaaccatagaccaaattcttactattttttctctttgtaggatatatatacctcggattcaaggcacacttaaacgagtggacgcagtttaatttggtggctagaacgttgtatcaggacaatatgcgggcgctgaaacggagatgggcgtgtggtttagataagccgtggtcgatgacgccaacagtttggaatgatttggtggacatgtttactgaatttggcccagatgatgtcggtttcatgtcttgaatgcttttgtatctcttacttgtcttccctttatctcattcctatgaactcagtattttactctttttttttttttggtaatggttttatatctcctattatctacgatcgccttctcaataaaatcagttgttatcgcttgatgtcacttgttaaattttatcataattcaagcgtaactcaaaaataactcagccatatcaattgattaactcaaccacaacattataataactcagttgtatcaatagcttaactcagacacaacattataataacttagtcattgcgttggattaactcagccacaacattaccagtataactcagtcacatcgttggattaactcagctataatattagcttaactcagcaataacattatagtaactcagtcataacatttgattaacttggccgaacacaaagtaccatttcattacaagttaatacttaaacaaaaaaaacaaattaaccctagaagcaagataaacatcaaacacataatggaatccaatagcaaacaaatcatccaaacatcaaacaaactagtagccaagaagaagcctctgttcgttggtttttgggaacattaggataccaagtacaatgacaatgataataaagccaagacaaaagcagcaaagtttgatcatcaattcccatttctggttttccctttcgctcctcattacttcttcattcagttctttcaccatcacctataacgcttctagcttgactgcaacctcagacttggctgcgtttatctcactgtccatggtggacaatttcggccaactgtctacaaccactttgtatgtaccatcttcgacccatttaaacaaatggtcctgcgttttcaatcacaaaccaattaacaacgaaaccaataaaacccaaaatcaattatacttacatcttcacgcgtaggacaacagaagtatggttctttgctgacgtcgatgtatagatgaccacgtctaatccgcaatgatacttcgatggtaacccacgtccctaacggctaacggattgcatactcaaaatcgagttctcggaattgctactcatttctttaattatagatgggaaatttggagacgaaaagcaagaaggaatgcatctccagatctaaaataagaaattggaattttataacttagggtttagttttggggatttataagttggcgcgtgatcatttggtttatgtcagaacgacgtcgtatccgatcaataactaagactctttcacaaccaatgtcgtatctggtcaataacagagactctttcacaaccgatgacgtatctggtcaacggagactctttttctctgtattttgacataactcagtcgtgacacaggaataactcagccataactatgttataactcgcccaaaccctaaaagtgctttccttaagccatcagttggtacagtttagtaattaacatatcataatcacattccaactagtggaatcatgaaactagctcataatctatatactttatccaacatcttactttatccaacttcatactttatccaacatcatacccaacaacatcatttgtagaagtttgatcaacatagtttgtcaatcgacacttaatgcattttgtctttattttctgttgtgatattgtacatcttaacactaatagagccaacgatttgatggctagtttgaaatctcataataacatttggtttctcataaatcggtcaaaccacgaaatcttctttcataactcagtcgtgacgtattggtattccaccgccaaactgaacatttgaatatttgagggtttagttttcaaatcaattcgaactcctttcaattattttgaatattaactattggcgtgttcgtgtgaatatgcagccaatcattattggtggttccccataaaaacactttttaaatctcgataatgacataataattgtttctcgataaactcggcaaaagcaaaactcagcaatattctattctatctgagtaagggacatcaatagaaccaacaatattgcttgtatacaaatgagcctagttataacatttggtttgcttataagtaggtcgaacatctaaatcttctgacataactcagtcgtgacgcagaaataactcagccataactatgttataactcggccaaaccctaaaactgttttccttaagccatcaattggtacaatcaagtaattaacatatcataatcacattccaactagctcataatctatatactttatccaacatcttactttatccaacatcatactttatcagacctcatacccaaaaacatcattcgtagaagtttggtcaacatagtttgtcaatcgacacttagtgcattgtgtatttattttctgttttgatattatagatcttgactctaatagagccaacaatttgatggctagtttgaaatttcataataacatttggtttctcataaatcgatcaaaccatgaaatcttctgtcataactcagccgtaacgtattggtattccaccgccaaacagaaaatttgaatatttgagggtttagttattcgaatcatttcgaacacgtttgaattattttgaatattaattgttggcttttgttcgtgtgcatatggacccaatcattattggcggttccccataaaaacgctgtttgtaatctcgataatgatataataaagaatctcgataaacttaacctaaaacaacacgctaattctactctatccgagcaagggacatcaatagaaccaacaataatgctaatatacaaattagcctatttaataacattctgtagtttgacataactcagccacaactcaggcataactaagccatgtgaatgttataactcggccaaaccctgaaagtgcctttcttacgctatcagttggtataatcaagtaattaacatattataatcacattccaactagtggaatcatgaaactagctcattatctatgtactttatcaacatcatattttatccaacatcattcctagacgttcgatcaacatagtttgtcaatcgacacttaccgaaaacccaatttattttccgttttcataatatagatcttgacactaatagaaccaacaatttggtggctagtttgaaatctcataataacttctggtttctcataactcggtcaaaccacaaaatcttctcgcataactcagccgtaacgtattggtattccaccgccaaacagaaaatttgaatatttgagtgtttagttattcgaatcatttcgaactcgtttgaattattttgaatattaactgttggattttgttcgtgtgcatatggacccaatcattattggcggttctccataaaaactctgtttgtaatctcgataatgatatagtaaagaatctcgataaacttaacctaaaacaacaagctaattctattctatccgagcaagggacatcaatagaaccaataataatgctagtatacaaatgggcctatatttaataacattctgtagtttgacacaactcagccacaactcaggcataactaagccatgtgaatgttataactcagccaaaccatgaaagtgcttttcttaaaccatcagttggtacaatcaagtaattaacatatcataatcacattccaactagtggaatcatgaaactagctcataatctatgtactttatcaacatcatactttatccaacatcattcctagacgttcggtcaacatagtttgttaatcgacacttaccgaaaacccaatttattttctgttttcatattaaagatcttgacactaatagaaccaacaatttggtggctagtttgaaatctcataataacttctgctttctcataactcggtcaaaccacaaaatcttctggcataactctgccgtaacgtattggtattccaccgccaaacataaaatttgaatatttgagggtttagttattcgaatcatttcgaactcgtttgaattattttgaatattaactggtggcgtgttcgtgtgattatggacccagtcatcattggcggttccccataaaaacgcttttgtaatctcgataatgatatattaaagaatattaatatgtctgtaacctagccatgaagcttttataactcagccacttctaaatttattcagccaatacaagacgccgtcgtttgattagtgctttttgtatcatacacgactatatagatttagtgctttagtgccccactaattgaagaaaagaagatggcgcaaagatctcttttccacgacgactctagagttgatgagaaaacgttttcagaaggaaatgaggtatttatcttgaccactgaatagtacaaatcgttagccacctaatgtggtggttttcctgtttgtgttaatgtaggagctcgattgtatggaaataaggatgagaatgaggtatggcgaaaacaggaggcgcaataagggcgttccgatcgagtttgattgcaatgctaaggttgtcgttgccacttctcgggatcctattacaagcagaaaactttatttcagttgtccgtatgaaatatcagatgtaagcatcttttgttgagttatgattctttattctctttcttttatttttgtatccctatgaatcaacctcttatttttaagggtctcggtcgaggctgcggtttcaagagatggtggactgttgcattgtgtgatgagtttgacatgataaaagaggagacaattgagatgaagaaggatcaggaagcagccaataagcgcattgaggctcagacagaaaagatctttcttatggaaaagaaatttgaaatgctagagaaaaagtatgagagcttgaacaagtatctgtgatcttagctaaatctggttttttcaatttgaaattccttgtactgtcaattttaattaaatcagcgacattaccgatatgtgcgatgataacacagccatcatattataataactcaatcaaacattcgaattagtctacgataactcagccgttaagtgttaccataactcagcaatcaaacacgaataactcagtcatcacacacgaataactcaacgaaacatcaagttaatataagatacgtccgccttaacgttagcataactcagccataacacacgaataactcaactgaatagaaaatagattatgaatcacggttacgcaaaatttaaaataaaaaataaagatttaacattgataacgtaggagtactgcaattcaataacataaaacaaaatttaaataacatggagatgtaattttgttatgacgatacaatcacatcaatcgccatcttcattcttcatctgattcaaaactttaactctcggtcgatccataccccattttatcccaatcaatactaatcaccttgaattcattcttctccttgtaagccttgcttacctgctcctccactttctggaactcttcctccacgttaaatccatcctccatcctcttcattttctttaggagattaagttccgtttctttctcacgcagtttgagatccaagaagtgtgcttcctccgtctcctttataaatgttgcatctgatgagagagatgatgcctttgaaattttctccgtttcaagcagcctgatgttggaaccgtcatccacacacggcctcttgttggaacctgatgcatccatgatctcggaagagatttgttgctcagagattagagaaagggacaagagaaaagagaagaatcgacaagagaaaagactacagtgaaccagtgtatatatagtcctctaacgacgtttaggttcttgactattcagttatatttataagaaggtaaaccggtgtatatgtagtcctcgagtgacgtttgggttctttgattacaacgacatttgggtatgacaagtcaaccaccacgttagaataactcagccgtaacatcaaataatctattataagtcagccattatggtagaataactcggccatcacacgatttgtgcggtgacaagtcagccaccagaataactatgccaaatgatgataggtttttagtcaattatcctaaaacaccaatcatgtcattgtagtattttaggttgtcaatccaaatgggtgtgatgctagcaatcaagatacaatcagagttcacagagttaagccaagcaataagaggttttcgggtgttctagcagtcctaagtgaacaagcaggaaacagaaattcaagcagaacagtaaaaacactcgaccaacacagcttgttgccaagcactggatgtggtcgagtgacaggtcgagtaatagacagaaaatgttacagggatactcggctgcacagtctgttgccagacaacttggtgggcgagtatcaggtcgagtaacaggcagaaaatacaaaaactaaacaacaggcagcgaggtgcagtaaacaatagcggagtaaacaaagaaatcaattagataaagaattcccgaggatggggtaattgagtagtttcgtttcttcagtttacagatgattgacatgctcaataaattatccctagacaacaagttcgataaccaaatctaagtgccaccgcaacagagaccctcaagttaaaccagtcccagactcaatcaccattgatgagagctaaccaaacatgcattacgaaccaacaagttaaagccaaaacgctccctgcaaccaataccttagtacagagccacgaatctctggaattagtggttcagacatttcatcgaacaccttttgggtgcagatatgtctgggctcaaattccagttgatcagaaagcaataggcattaagaacaactaatctagaaaggatctataaatcaaactcaaccacctagcgtattgacaattctaaactactctcaacagtttgatacatctagcggatttggatttctttaacaactaagattcctgtttttttttaaattttacccttcttcattagctaacaagaactcttttcttttctttacaaattccaaaacctttactagactttttctgcttgtttagcttacttcacctagagtcttttaccttttcttatcaatgaatccatcctttttttttcttttagacatatcccaacccaaagtataagcgcccacttagtcctatctagtccggataatgcgaactagaactacatgagacactatctctatcgttacgaacctaacactttctaccaagcttagtcggaataagacctcacaaacaataataactgatatagggcttgaaagaaagtttagatttggttttggtttaactgctctaataaggagattcagctacttggattaacaagagtggttaaaatgagtaagaaagtccaagtattttagggtatccatgagttccaatttgatgcagacatgataattgaaaatcagattcaggttcaaattgatagggaatggtatcagatcatgacagtgtggttgagtagagtaatctaggcatggtgcagttttacttcaatttcattgactacgcaacagataactagcaacgaggacactgagtttacccggtgaaccaaaacgcttacaaggctatcttatcattattccctatgcatatgcaacagtcctaaatgaaacactctaaactcaatcctaaatgtaatgcaactacatgaacactctgtttttgtgaaatcattttctgaaaattttcaaattttattggtttttctatgccttagatgaatgcagactcaagagtatatacaatgcaacacacacttcctgatccctcccccaaacttaaatcacacagtccactgtgtgactaaacttggaagagagtcctcaagacaaatcaaatcacagaaacaaaataaaaaaacaaatcacaagagatggtataatacaatggtgaagtgaggcgcttacctaagtcgaataatgaacgaagttggtcgtcaatgctgcctgtgattgctcccaggccattgacgagtcgccctattctatatcagctccagcgtgtgggtactcgacctcatcagctatgtggcggccaacaccgctcgtaggatacctgacctctctccttctgctgcggccagcactgtggtcgcgtaaacttcgagattatagaagtcttcttctcctggtgctagatcgagtgagcgtggtcctcctctttctcccagattcatgaggctcgaatgatgaatgcctcgcaggcacatgcgaaacctcttgctcactaggctatggctcgtcatatctcctcgagggcatgtcctgagggagctggccctgcggaatagctgtagtggcagaggagcagcttagcttgtccttaagaaacttgatagccttgaagaacttggcgagttacttatcctgtttcttgcaccacttctataacttgctgttgttcttgtgagcttcactaaaactcttgctctccctcgctggaggtacatgctcactgaaatgatacattctcgtgtcaaactctacttcatctgtttcatccgtcttatcaacctcttctgttgtagctccttccgtgtgagtgatctccttagttggcaaactgccctcgaaataaagatcttcaagcgcaggcttgaagtcaatgttccttccctcgagaatcctagtagcgtcaatgtagaggcgaagtcgccaaccatgtcatgctccaagaactcacattgacgcaaatgatccaaatccatcattctcggttctaaccttggttccttcagcggtactccacaagctaccagaattggcgtcacaacgccacctacgcatagtgctcctctcaccttcttcttgccgtttgtcaacgtccacatcctgtatccacacaagtggatcaacataagcattactagtgacgcgtcattgagatcgcctctcaggaccttctttccctttgtacggcggagaatgcttgtaagtgcggaatctatcatctccatgtctatgttagacacagtgcctgtagactccctggagtaaagaacattggcaaacgagcgctgaaagtagcgaatcacaggaattcagatttggttggtcttggaccgcacagagtttagcggtacattgttgccaatagtagcccacaaatccttaagctcttccctgtcaaacttaggcttggttccctttccactagggaagccaaacagttcttccaacttcttgatcaacaactgatagcgatgctcatccattggtatccagctcaaattctgtgagaccctgatacatctccacttgcattgtggagagaaactcgatcgtttcctccttgtaggcagcgtatgggtaagacatgagtgtctccagatgacacttctcaaacagatgctgcacgtcctccagtagcccagcggggctaaagtctcgtagcaaggatacctcgttccccataaatcgttcagctcaaagagtcgtatattctcttcgaatggaacctcatcgggtttgttcaacagctttgtctccttgcgctatgactctggctcatactcagtcttgatgtcctcatcaatcaactcatacctactcgacttcgctctctttcctctagcgatttcagctcttctctgactacgtcgagctgctgagcgttctatttcttcacggaagctcttgtaagcatgttcttctctctctggtctagtggaccaagattcagcttcatccacaatatactcttgatccatagaagactcactactgtagttacgcatgttgatttcctgtaaacagatggaactcaaagagaaacgttaatacgttagctccaacgaaaccaaaaacactaaagcacacagtcgagtgagtaagtcgagtaataaccggtcgagagattttgttggttttggaaatcgaattcgtcttgcttatttgtgaaccgatcgagtgtatggttgagtaataaccggcgtcgttgatttaaagaagacttggtcagcgatcgagtgagcttgaaaaccgatgatggcgaagagaacctcactgtggtcgagtgaactccaggattggtgagaagaagacttcgcctggtaaggaggccgagtagcttctttctccttttctcttgtgaagcgatcgagtatatactcctcttcttctccgtggttgaatttggggaaccggtcgagtgattgaaacaaaacgattgaagatgatgaagcgatgagagtgaggtcgagtgatgaggaggttgttgttgagcgacaaagtaagagggttggatcgagtggtgtacttcgcgatcgagtggattgagagcagcttcgttctcgtttctccgttgagtatgtcgagtgataaggcgatggagagatggcgtggtttggtcaagggtcggtgaggaagatggtgatcagagatcgagtgaagttgttgaagttggagagtgatgaattcagagcaaaagagaagacggtgtttttttcgatgagagatggcaccagcttggtcgagtggattggtgcggtcgagtggtggtagtgatggtgttgttttgtggctgtcgaatgaatggggtcggtgaagctggtcgtggtcgagtgaagaacttggtgaacttgagagtgagtgacgatgagagatgagagaggtgcggtcgagtctaggttgcggaaaaactgaggtagaaatgcttgttgaggtcgagtgaagagtgaaggtaagggcgatttgaagagatggaggtcgagtgatgataagggtaagggtaaggtatggttggttgagaagagatgagggagatctcttgtctgttggttaggagcgtgggagacatagggtgcagtggtgggtctcacggttgtctctttgttcttaatcattgctctgtcttcactaggaaaacctgaggaaatccggcaatccactgtaaacttgataaactccctgtaatactctgtagcttctgttggtcgagtataataatgatttaaaaatttttgggttttaaacatcacacatactcgactgatgtactcgaatgcaaggtctccacgtgcaacaaaaagttttcaaaattttgcactccactgggctatacactcgatcttcaggccttttgtagagtaagagttttgaatttttactctatctccacgttgttcctttgttactgagaaccacaaacacaactaaaacaaatcaaaaataacaagaaaataaaaatttatttacagagatagtcatgggacttcctcccaagtgagcttgtttaaagtctctcgcttgattaagaagaaaatgggtaatacagagggtctgcattgtcctctctgatatcatcatcatattcaacgtcctctctggagaggtgtgcagcagaatactcaattcccctttcttcaaagtaggcttctttctctcgtggagggtaatctatctcttcggaccatcttgaagtgaacttttttcttgggataatgtcaatcccgcctttaggctgagcttccttttgcatctgattcagcttactcttaagttcctcaacaatgtgggctagctcctctatagttttttcttgtttatcagacctctttttaagttcttttacgctcttagtctcagatccttctcctgggatcactctatcgtcttcagaggtttttccatcttctgttgacctttgtggagttttgttgatgtcaaactgaagcttgatgtgatttccaaggttgagatttattttcacttccctgacatctatcactgctcccactgaggctaagaaaggtctttccaagattagatgatccttatgttcttctttcaatctagcacaacgaagtttgtaggcacttccactccattaattatgacgggtaaatcttttagcatgccaaagggttttcttgaagacctatccggaaggcggaaagtcaggtcacaaggcatgtactgaatgaattccaacctccttgccacagagagtggcattaaactgacagaggctccgagatcgcacaggcaattgctgaaagctaattccccaatggaacatggtagagtacaagatccaggatcttctaatttttcttgaacaatcctcttatcagcagctcgagatggattagcatcacattcatcatctgaatcgtgatacatcttgatcctttccagtatcagatttctcacatctttgtgaggatcatgaatcacgttgagaacttccataagcggcatcactacttcaatctcgttaagctgtttctctgcaacagatttgtatctctccatccaggctttcctgaatttccatggtaaagcacgtgagggtaatggagtaggtttgaatcgttttgccattctctcaattatggctactttctcttccgaggtggattgaatgagatggtgagaaccagcagagtggttgaattcaacaacagagaccttaacctgagtagaagcctctccttcttgaacatcattgtcccagtgattaagttaggaacatgtctagttggcagctctcgatcatggcagatagtgatcgcgttaacagttgcatactccttttgattctgtatgggcttccctggaagtcctgtaactttgggcgcagaggtagatgctgattggccttccaaatatctgactttggtattcaatgcctccactttggcattcaggtcattgtacctgcagtccattgagctagatgcttgttcttgtagcagctgttgtgccatttgtttcatgttagcgtcaggagcgggaggaccttggtgttgttgaggtgcaaacctaggtggtggttgctgctggtagttccctgaaattgctgcttggaaacaaaatcttgcttgtagggaacaaaaggtttgttatgaccttgttgtcgttgtggaggatacacttgatcctgaggattagcaatgttggtgctgcgataagagaggttggggttgttagtcttgaagttgttgtatcctttgtagccactttgattattgatgtagctaacttcttctaactgattcccctccccatcttggacctgatactgctcgtcatcaacaaggaagtgcacatgcttctgctggctaagaagaatcttgtcctgcttgtcattcaacgctttgatctccttcctatgtttgtcatccgagtcagttgtgcctctgatggtcctctcgcagtccttgttgtaattatcatttgattgagctaggttctcaatcaattcccatccttcttcaacatctttgttctggaaattttcattgctggcggtatccagaagcattctgatgcgtggtaaaactcctctgtatagagtgctgagtagagaggctttcttgaagccatgatgagggcattggttggtgtaacccttgaaacgctcccatgcttcacagaagctttcaccagtcttctgtgaaaaactagaaatctcatttatgagtcttgcagttttggcgttggagaagaactttgctaaaaaagccttcttgcaatcaacccaggtgatgattgagtcatggggcatattcttttcccatatgtgtgctttgtcgcccaagaagaatggaaacaaccggagcttgaatccgtcttcactgacaccattgacttttgttaggttgcagagcctatcaaattcatccaagtggtcgagtagatcctccattggtagaccatgaaatttgttcccctgaatcatcgagatgagaccactcttaatcttgaagttgttgttctggatagtaggaggtgcaattcctttcctctggcggtggtcccgtggtgcatctccagcaccaatgtttggtgggccattctgttgattttgttcgtcagtcatttcgagtggttggtgaggtacaaggtttactgtgtttctcctttctctgagttcgcgagatatgtggtcgatgttatcgttgaaaaggaggttctggttgcctcttgatcgagtatgcgtacagcagaggtgtacctggatctagaagacaacaagaaaaacacacagttagtaactgaaataaaaattgaaaaagaacttgatctaagaaagtctaaaatcttaaatataacaaacaaacacccaatcagcaacgacgccaaattgataatagttttttagttaattatcctaaaacaccaatcatgtcattgtagtattttaggttgtcaatccaaacgggtgtgatgctagcaatcaagatacaatcagagttcacagagtcaagccaagcaataacaggttttgaggtgttctagcagtcctaagtgaagatgcaggaaacagaaattcaagtagaacagtaaaaaaactcgaccaacacagcttgttgcaaagcacttgatgtggtcgagtgactggtcgagtaaaagacataaagtgtaacagggatataaaatgcacacttatcaccaaacatcaaattaaactacgataactcagctgttacggtataataactcagcatagcacgatttgagcgatgacaagttagcataactcaaacgtaaaaagaattgagcgatgagaagtcagtaattacatcgatttaacttataattaacttaatagatttatacagacataattctggttatgaatcctaaagcgtgaatatttagtacaatcacatgctaaaaatcccaaaagacacacacatatgttcgaaaaagccaatcactgctacaaaaaccgtacagccatccttttcggtgcttcatcgaagatctctgttgccatcctaacccatagagcctggatatttgcatcagtaatgccatcaaaacaaacaccaagcaataaacattcaagaatctttaacgtgtaagcgctgtagtcccctctgatatgtttttgcgggacctttttcttgtccctctgccggaatgaaaattggtcgtatcgtggcatacggacttcagaaggaatcggttcgttcatcatctgtagaatcatcctcgtgaacggcctacaagcttccagcatttttccatcgctctcgtctgtatgctcttagcgatgcaatcatagcaatcgatgtgagacgtaagcaagttcacgtgaagggtcaccaaatgattacctccggttggtggttaagatacaagtgatccacatctgttatccacttcttccgcgttaggagttctccagccgtaccgttcatccactgttgatacgcggtctctttgaaagaaaacctctttggtttgattttccactgattgtattcattaacccaataagtcgtgaaccaatctcgtaggagcctctgggcgaggattttcatatacgcagcaatttgctgtacaaaaataaaactatccaagacaaaacacaacattaactcaactgtaaccaagtaaatttcagcctcaacacctaaataaatcagccattatctactttaactcaggcaggacaataccctaactcaaacataaccaactacaactcagtctgcacaccagaataaaccagctataatttatttaactcagcctgaacgacacgataacttagccataaagtagacaaacttagacaaaatatagcaataacttacttcatcaccaagccatccatattttgaatctggtcaaaactttctttcggtcatgataactctgtagaactgcacctcgtctattccattttccaacgattttttgctaacaaataataaaagaaagttaatatacacaaatagtgtaagcatgtcatacttaacaacttattacggtataaagagccataccagtcgggacttgacaaataatccttaagtttctgcaatttgactggatcaatcggtgccatagaatcatagattcctcatgaaggcagacaacccttcatcatgcagctcagcccgctgtctccaattactggaaaagtcatagtggtcatttcatcgagtttaatcaatgaactcccatccggggacaacttaacagtttttctcctcgcagcttttactctctgcagcctcatggtttcctcctcatcttcatcagactcaggaagcaggcgattatactcagatacaatctggtcagtaacatcaagtatagaatcatcatcagctaccctctcaccatcagctttttccttggcttccttaggcttattcttggggacagaagaagtatcaccgtcaactttttccttggcttcctcaggcttatttttggggccagaagaagtaccacagtcagctttttccttggctttttcctcaagtgattttggcttttttattgtcacctttagaagcacctttggaggcacctttgtaggtggctttgtagcagcatttcttcctcttttggctggctctttcacgattagctcatttaatattttctccttaacattgcctttcttctttggtgatgttttcgctttggaaattctcctcgccgccgtcgtagagcgtaaacggcgggaaccaggagacttctcaatgaaatcaatatcagaattgtttccttcagtggccttagcaaattctccatcaaaattcctactaaccccaacctctgcaatatcagcatccttctctaccactacaacttctttcgactgcataaacgtaaagaaaactcaggcattaaataatgaaaactcaggcctatgtataaatataactcagcaataactaaataaaaggtataacttagccgtataatatgcagataactaaataaaagttataactcagccgtataatatgaagataagtcagtcgtaacaaaataaaaagtaataactcagtcgtataatatgaagataagtcagttgtaactaaataaaaagtaataactcagccattagcttaccggaggaggactagtaacagattggttatttgtaggtttccttttacctttttgtgtctgttgagttgggggtttagggtagccttgctgctctttggttaaaaacatatctctaattaaactagagtttaattctaagtcaactatgccagtttggccagttagtcctaccccaatgaccttcagatgctctttcatctgtttgacctcgttctcaatggatgcaaaccttctttcaaactttgcataaatcctcgattctacttgatctccaatcacctccaaacgggaggacatttctttgatgttattatcaacggtgtcaaatcttgagtttaagggagagattaagttggacaccgcatccacgagcgactgttctccccgaacatcctgctcgtcctcgtcctcatcagatttgacagctacttccttcttcttattcttcttcttcttttgtgcatctttctcacgagaatgaacaccctcactgtgagagactttctgcttctttgcgggagtttcagacacatccgcatctttatcttttacaagtttcttcttcttctcactcgtcttcacatcccaataacctttaacaagcttagcctcgtgtatgtcttcgatcaagtgatcaagtgctaggtcttctaattcgtctggccaagtatgaaacagctcgcttaactcagcctttggaaccattttacgcacacacagctacaacacaagagataataaaactcatcagtatgtttaactcagccatagtataactcaggcgtcacagcacataactcagccattacagaacataactcagccatcacataacataactcagccattacataacatactcagccgtcatataacatatttgccaaaaaagagaacataactcagccttcactgatcataactcagccgtcacataacatacttgacaaaaaaacagaacattaactcaatcataagagagcataactcaaccgtaacataaatatttgataaaaaaacagaacataactcagtcaataactatcataacagagccaaaaccgtacctcaccaccattcacttatcttcagcaatggccgattctattattgcacgagtactgttgcctccccatctaagcaacggaatctcatccgctttaactacgttcccaaaacgctcgccgatggtgataattgaatcatacgcccaagcctgcaacacgaaagccataccactaacggtgtacgtcttgccaataggcctcagcaactttatagaaacaacaagggcttcaaatgctgcccgaccccatggataagtcttcatggcttcatcatcaaaaactcttttggcactctctaatggtatcctagagttaggatgcaagccataaaatccaatggataaaagagtcaataacccaaaccatctacgctttttatgaggccatgctcttcacattactaagccttccgtaagttcttctaacttaggaccttcaccggttggcgcaggcaattccctaaagaacgctttgtagtccgcttcaggctcaaacttttctgtaggtagtggatctgtgtttaatcccgtgatatggcgaaattcgttcaatccaaacctgatgggttgaccagccacgagacaccaaagctccttcttcagtattctcaactatctgcatagtagataatgtagagtcttacgagaccatacaaaatgactatcaacaagcttagcaattaatccaatcggtgtctctttcagttcatcccatatatcttgtcctattgattctctaattgcaaagaaatctcccagctttatgttgtgattaatggctttaacctccagattagaatccccctatgggtaaaatcttggagggtaatcccttgcttggtcttcagacatctgataaaacataaatcagccgtaagcattcaataaatcagccataacataaaataaactcagccacagataccataactcaggcaaaacataaacctaactcagccatagataacataactcaatcataacataaacctatctcagccacacataacataactcaaccataacataaatctaacttatccatatcgtaacagaaacttagtcaaaccataacataacaacaactccatcaaaacataaaccaaactcagccatagcataacagaaactcaaccataacataaacaaactcagccgtcatataacaaaaactcagccacggatgtaaggttaaaccataactcaatcacatcatataacaaactcagacacaaatgaattgataaatcataaatcagtcgataaacaaacagtaactcagccatcaaatcaaatagatctaacaaatcggccaccatatgtcaatcaacaacgacgtaaaaaccagctttaagcatcgttaaaaaccatcgttaagcatcggaaaacgatttcagtgacgggaatcacttgcgattgaacttagaagtcgaattcttgtcggaaaattcgaaataaagtttggaaacatacttaccggaacttagagaagttcagttcaaatgcgacagcgacatggatgtgacttcacgataccagaaatgcgactccggcgtaagaatttcggccggaacagacaagaaaagagaaaacggcgaaggaattacggtaaagagttcgttccatcgagagagaaagaaagcgacaggtttttttccgctgatgaacagtaaaatgccaaaagaaatgaaaccgaaaagttatgcggtttcagatgagtaatgacgtggattatattgatgacatggattgatgacatgtataattagtgttttttaatttaatatttagttaaaaatgaattaaaaataatatttaattaaaactcatcaaaaatgttaactgtaactacacaagtactgaaaatatgtgaataataaaaaaaaagatgtgttttattctaggaataaacatacaattgtgttctatcctagtaattattttacaaattattccatgcaacgtacgtatgctttgtgaaaaaacaaaaaacgtatgctttgtgctaattaatacgttcaaaagtttatagatagactaaaaccttatcaatggtattccggacgtgttgtatatctctaagcacatgaatgaaactaaaaaatcatgtgaagtgcaaaattgaaggaatttaaacgaagagttaataaatcattgaaaaaatagaggatgaaggtacgataccatttggttattggttaatggcggcagagacggactgagattatgggagaagaaccatcatcgcgatgatgggaggtggccgtacgtgccacattatggacttatggatggagtgttagggtgaagagacctaactgaaagagaagaagcataagaagaagaaatgggtagtcaaatttttgttgccatttttgttttaaggaaagtcaacgagtaattaaagtgggtttgaacagaataattttttttttttgtggttttaacttttaagtgaaaattaatgagtaattttaagaggtttgttaatgtgtgatatgtctataatttgcatgatttaggcattcattcttcaccactttgtcattgtttcatccacaaatcatctcattaggagtcgttttagtgtgttttacatacttaggacgattttgcattaggattgcatgtgcatggcatatttggttgttttcaggtactttggatgtttttggagttcaaacagaggaaaaacagaacatgaagtcagaatgcccaatgacgccttcagcaaaaatactctatcgcagcctcagagccctgctagggccaatcactctatcgcaaccccggagaagcaagcagctcagtttcactcaatcgcgaagccggaggaatcatcccatcagaactactcgatcaccactcaaccaccaggaagcctatctgctctttctgcactcaaccagacaagctgagaactaagaagagaagagaagccgaagaaaccactcgatcaccaaatcatgacatccactcgatcgcactcgatcacagggtcactggaccattcaatctcgacttcactactcgatcgcaagacggagcccttgaagtccagtttgatcaatgacatactcgatcactgggaagctcatttcagcccgtcagatgccaatgacacattcggtcgcgggatcatgacgtgatgattcgctatatatttagtttccttatttgtttcatttctcgcttatataaactgcctctagggtttttccgagggcatccgctattatccgttattatctcgcttttacattttcgcaactttgatagccgcagtgtttctcctgcaactttgtattttcactttcaagtatttgatattcagttttcgtttaagtctttcgtcatttctgttatcatgtttttaatcgttgctttgctattgtctttgattatgtctgagtagtgaactgtatttctgaggatgggatagaatagttgtggtttacttggtcgttttaggtggttgagttttgaatactagaatcccttctggattagttgcgcttattccttgtttcattggctaatgtggagtatgagtccagacgtccaacgctcaggaggcgtttaatgggcgttggatcctattaattctagagatatctgactctaccccaagggattggctgtagagagggtattgactttaacatgttgattcgataatgcctgcttagttagagatcgctaaagggatttaggtcagtgtctagctttacttgaggatttctatcacgggagtgaattaatctgttgttgaacttgttgtctagggatagcttctgtgaagttttgtcaaccgcctgaatagattaagtagaccatactattggattaccccatccttaggaatcgtttatccatttgattgcctgttaacatttctgctttgtcattcacttgcctgctattgccatttctgcttttagtttcatttcatttctgttattgcatactaggactgttagaaccaaccaactttctacgtggcttgacttagagctttctgatcatatctcatctgtttgcatcacactggattggattgacatcctaaaatactacaacgataggatagtattttagggattaattgagtaaaatcctactatcaatttggcgccgttgccagtttggtgtttgtttgctatatttgagatcattagaaacgttaagatcaagttcgtttttgttacacacgttactaacattgtgccttttctgtctttgtgttttaggtaccttgcaacctgctttatagacgcatctctgattcgtctgttatagcccggctgctatctgttgcatgcatacacggtcagaaagaaatcagaacctcctattcaacgataacatcgaccgtattgctcgccaactaagagaacagacagaaaccgacacaatggctgacgttgtagatgagcaagagcaacctaccaacattggtgctggtgacttccctcacaaccacaaccagcgtcatggaattgatccacctccagtacagaacaacaactttgagatcaaaagcggtctcattgctatggttcaggggaacaagtttcatggcctgccaatggaggatccgctagatcatcttgacgagtttgaaaggctctatggccttactaaaatcaatggagttagtgaagatggtttcaagcttcgcttgtttccattctcacttggagataaagcccatctgtgggaaaagacgctaccccagaattcaatcacagcctgggatgactgcaaaaaggccttcttggcaaaattcttttccaactccagaactgcaagactccggaatgagatatccggattcactcagaagcaaaatgaaagcttcggtgaagcttgggagcgctttaaggggtatcaaaccaaatgccctcatcacggatttaagcaagcttctcttctcagcacactctatagaggcgtcttgcctaagataaggatactgcttgacaccgcttcaaatgggaattttttaaagaaggatgttgaagaaggatgggagctagttgaaaactttgctcagtcggatggcaattacaatgaagactatgacagaagtatccgcaccagttctgactctaatgacaagcacgacagagagatgaaagctctcaatgacaaactagaaaaaatcgtccaaatgcagcagaaacatgttcacttcatctctgaagatgaaccattcccagtacaagagggggagaaagatcagtgggctgaaatcagctatgttcagaatcaaggtggctacaacaaggggtataattattatagaccaaacccaaatctttcatatagaagcaccaatgtcgccaaccctcaggaccaagtctacgctcagcagcagcagcagcagaaccaacccaaaccgtttgttccttacaaccaaaaccaagggttcattccaaagcagcagtttcaaggaggatatcaacaacagcagccacaacctggtttcacaccacaacaacaacatgcacctgcgcctcagaattcagacataatgattatgctccagcagctcattcaaggacaagccacaggagcaatggaaatcgctaagaagttatgtgaagtaaacaacaaaatcgaccgacaaggcgtcgaacttaacaacaagtccgaatcaatgagcactaggatgagatatgtggaaggcatccttgcatcaccatctgttaacaaaaacccatgccagcttccagggaacgcaatccaaaatccaaaggagtatgccactgtccatgccatcactatcacacatgatcgagagctgccaactcgatatgtccctacatcaagcactgaggacagtgtaattctacatggggaggatttttatcaagatgatgttttggctaacaacacaatcgaagagcccatactcaccagtcaatccactcgaccacaagcttccccagctactcactttgttgaaaaaccggaagctgcaaagaccaaagacacagtcttcgtgccacccccttacaaacctccgcttccattccctggtcgttttaagaaagttctggttgcaaaatatcgagccctccttgaaaaacagataaaggatatgcctttagtggcctatcttgcactaatacctgacgagcacaagtacgtgaaagacctgattacagaaaagatcaaaagaagtccaaggaatggtggtattaagtcatgagtgcagtgctatcactcggcagaagattgttccagaaaagttggaagatccaggatcttttactctaccttgctccattaggcaattgactttcagcaattgtctatgtgatctaggagcctcagtcagcataatgccactctctgtggcaaggaagctgggattcgttcagtacaagccttctgacctaaccttgattcttgctgataggacttcaaggagaccttttggcctgttagaggatgtgcaagtaatgattaatggagtagaggtccctactgattttgttgtgcttgagatggatgaagaatctaaggatc

SEQ ID NO: 487 - DNA, 77287 bp, Arabidopsis thaliana
gatccaagaaaaaatcgaaacatgcctttagtgcaaaagggtagacttaagatcattattgggtttagagataggaccatctacttgttattcacggtttatgtcattgggtagatagggtgctattcttgtatgcataggttggcacttacctttaggattcttctaaagctcagtcctttttcattgagagtcccctgctattaaattctgaaccactaaaaagggaacatttttgtctcataacctgtcattagccaaatgagttcactagtgatgcatatcttgattcatgtttttgaacttaatgaatgttaaagggattggttgatcttgacgcattgtgcatttgagtgtaggtttggatcataacagagcatggctaaagtttttaagtagaagtcgatcacctcgcatcttagaactgttagctggtacattgatcttaattgtcatatctcatgctttggttctgaatccccaacttcaaacctctccttctgcttatgtcttcttgtttgcttgagggcaagcaaagactaagtttggggaagttgatatgtctataatttgcatgatttaggcattcattcttcaccactttgtcattgtttcatccacaaatcatctcattaggagtcgttttagggtgttttacatacttaggacgattttgcattaggattgtatgtgcatggcatatttggttgttttcaggtactttggatgcttttggagttcaaacagaggaaaaacagaacatgaagtcagaatgcccaatgacgtcttcagcaaaaatactctatcgcagcctcggagccatgccagggtaaatcactctatcacaaccccggagaagcaagcagctcagtttcactcaatcgcgaagccggaggaatcaccccatcagaactactcgatcaccactccaccaccaggaagcctatctgctctttctgcactcaaccagacaagctaagaacaaagaagagaagagaagaagaaaccactcgatcaccacatcataacatccactcgatcgcactggatcacagggtcgctggaccattcaatctcgacttcactgcatctcactcgatcgcaagacggagcccttgaagtccagtttgatcaatgacatactcgatcactgggaagctcatttcagcccgtcagatgccaatgacatattcggtcgcgggatcatgacgtgaagaacgtttaagttctcgcttatatcactacaagaaaacaggtgataaacgacttacacggcagttgcatagtagtcgtaaaaaatgataatacgactaatcagcgactaacgacgttagtcattattacatagtcgctgaatgagatagtcgtgaattagtcgttgatcgacgactatattacgacaataacacaatcagtaaacaatggtcgttgtatagtcgtatcgtattggcgactatttaacgaccatagcacgattaattgtcctgtacgaagcgtgtgaaacacgtggtcgtataatagtcgtataattgtttccgacgattggacgactaattctatcaatgtaaggaaataattctcgtagtcatataatagtcgtataatgttttacgactattataggtctcgtggacgattatattgtgactaggtgtcttagtcggataataatcggtaattagtgtgactattaaacgactattttacgtctaatttgctacctaaatacgactactgagcgactacttgttttgtccgaataagaatttggtcatcgattgttgggtttcttgtttcttgtttgttggttatcgattgttgttttcttgttttcttgttttctccttttttatttgaaatgctaaaaagatgaaaagacttgtatatatagaaaatcaagtacaaatacacatacaattatcttgtttattacacaaacaacttattcaaataaacatatgttcaagtagagtttgggcaaagataatctaaggatcattaggtggaggacttggtatacgttctatggttgtggtagagtgacttgccatgaagtccaagaactgcggatcggtttggcggagatacttctcgactaaagacaattgctcgagcttgtccttttgctcagctgtgactcgggatgactcagcttctcgggcagcaatctcagcatctctcttctcattatatgcagcctgctcttctattttcctttgagcttcctacagccgttcttctagggcttgaaaggatgatgaggaaccggagtgattgcggttggcgctgcctagagtgtcttttagacatcctagtccataaggattgcctcttgaatccttttctgtggactgcaagaaatagagaagaagctcattagtgacagaatattaattggactctaagactcataattatactaaaacatcttacctcgagaaagatggctgtataatcatctagtgtgagctccggaggtcgtgaagagccatcagagacagcagaagcagacgcctctagtgctgacagcctatctctcacattctgctgataagcttgagcaatcttctccgacttctgatcaacaaatgagccatccgacttagtgtgtgtttcgatgaacacctcaccaagatggaccggtcttcccaacttctcttcctgcaaacacaaatcaatatcaacagtagtcactagacataagaactcaacatactcacaagaaaacagactatattggattgaaaacagaaaacagaaaactctaacttatgagaatctgcagaaacacttaccaattcatcttggatttcttgaaaagattttggcccagagtagtggacgtgaggaccgataccgttacggtcagagagacgagctttggaataggtccgactccttttctgtgctgcttctgtgtcccagtaagcacacattgttccccacagcgtttctccaatccatggaggctgctctcgagttgtccttgcggtgctaaccatgtccttcaagcgcctcttgacgatctcattgaagtaatactggactgtccctgttagtaagggatcccagtggtgagttttctacaaaaaaaaggaagaagttagtgaaactacataaacttaacttgaacaagagcagatatagaggaagcttaccgcaaactctaaaaataatctttctcttttatcaactggaacacatgaccagttatagaagggagcatcgaatttttgtaagaaaattctagtgatcttcctaaccaagcgagatcctctgtctcgagtaaacctccaaacacatgcaacaaagaaagaagtaaacatgttacaaaagtgaacaaaattattttcccaaaagaaatacaagtcacacacgactataaaccatgttccacaatagtactgtctcaacaatatagcatcattcacaatcaaagcatcatcatgataataggtttttaagatcaattaatcctaaagcactatcatgtcgttgtagtactgaaggttgtcaatccaaatgggtgtgatgctaacaatcaagatgtgatcagaagtcactaagtcaagccaagcaataacaggttttggtgtgttctagcagtcctaagtgaacatgcagaaaacagaaaatcaaacagaaacagtagaacactcgaccaacacagctctttgcagagcactgagtgaggtcagctctttgcagagcactgagtgaggtcgagtgaatggtcgagtaacagacagaaaatggaacagggtactcgattgcacagtctgttgccagacaactgggtggtcgagtaccaggtcgagtaacagtaaagaattgcagaaactaagcaacaggtgacaggatgcagtaaacagcagtagagtaaacaataaaatcaatcagacaaagaattcctaaggatggggtaattgagtagtttcgtttcctcagtttacaggtgattgacatgctcaataaattaaccctagacaacaagttcattaaccaaatctaagtgccaccgcaacagagactctcaagctaacctagtcccagactcaatcaccattgacgagagctaacctaacaggcattatgaatcaacaagttaaagccaaaacgctccctgcaaccaataccttggtacagggtcacgaatctctggaattagtggttcagacatttcatcgaacaccttttgggcgcggaaatgtctgggctcaaattccagttgatcagaaagcaataggcattaagaacaactaatccagaagggatctatcaatcaatactcaatcacctagcatactgagaattctacactactctaacccatcctcagaaacctattcactactcagacatcatgacaaaaagcataaacgttgaacaggttgaagacatgataacagcagtatgataacagaatgaacaacagtaaacgaaaatcaagaacagaaacagaatactgaatactgaatagataaagagaaatccggattacaaaaagtctagaacacaaggtctgcggaaataaaaactaggtaaaaacttcttgttctcgaaaatgagaagtacatgctacttatagccaaatatcccgaaaccctaatactcaaaacgacgaagtatttggacgggttaagcactgtactcgaccaacgtggtcgagtgaatagctggagtcttcttttcttccttgtgctcgagtgtctggttgagtgcagaatgaagaaggctctgaagcttgtcatcgagtatgcagtcgagtggtgtgatggaggtactcgacctctaggtagagtgaggaggtcgagtggttgtctgatgatggaggtgaagacactcgtcctcatggtcgagtgaagtgatcgagtgactgtctggtgatgagatgatggcactcgacctcggggtcgagtggtggttgaattggtgatgtcctctactcgacctgttggtcgagtggtctcttgagatcttgaagctcctactcgacctctgggtcgagtggtttgtcatgatcaggtccgctccttccagatagctcgtcaacagctccaaatcacctgaaatcaacgcaaatatgcaacatgcatgcaaaactatcctaaacatgcaaagtgatgacaaatgatgtgaaatagtataaaacagtgatgatatgatgctaaaatgatgacaaatggatgctcaaaacatgcaaaatatacacttatcaactcccccaaacttagtctttgcttgccctcaagcaaacaatcaagaacaagctggaggtgacgtttgaaagcggggacgcagagccaaagcattagataaaccagatgaaatcaatgtccaagttgaaagttctaagctgcaagaccgaattctacttaaaaacgttagccatgcctcattaatcaatcaatccgactcatatgctcgacctacataagttttcaaatccaccaatccctttaacattcattagttctggaacgtgaatcaagcaatgcatcatcaaagaactcatttggctaaggtaaaaggtcaagagacaaagatggtcccttacagaataggcttcagtaacaggggatctctcaaaaaatgattaaactttagtagaatgctaaaggtaagtcccaagctatgcatacagagataagatcccatctacccagagtacatcaaatgaagctctaatggtaatcccatctccaatcccaatacaagaactaaactctatcctttgtattcatgaatcttttaaaccctttttctaatcattcttttcttttctcttaactctaggcgaagcttcaacactttgatatatctagcggatttggatttctttaacaactaaggttcctgtttttaacattttaaaaccaagggcttttgcccatcttcaatagctaacaagaactctttcttttctttacaaatcccaaaacctttactagactttttctgcttctttagcttacttcacctagagtcctttaccttttctcatcaatgaatcaacccttttttttctttttcttttaaacacatcccaacccaaagtataagcacccacctagtcctatccagtccgaaaaatgcgaactagaactacatgagacactatctctgtcgttacgaacctaacactttctaccaagcttaatcggaataagacctcacaaacactcacaagtgatatagggcttgaaagaaagtctaggtttgggtttgggttaactgctctaataaggagagtcagctacttggattaacaagagtgatcaaaatgaataagagaatccaagtattttagggtatccatgagttcaaatttgatgcagacatgataattaaagatcagattcaggttcaaattgatagggaatggtatcagatcatgacagtgtggtcgagtagagcaatctaggcatggttcagttttatttcaaattcattgactacgcaacagacaactagcaacgagggcactgagtttatccggtgaatcaaaatgcttacaaggctatctcatcatcatcccctatgcatatgcaacaatcctaaatgaaacactctagactcgatcctaaataagatgcaactacatgaacactcttttttttgtgaaatcattttctgaaatttttcaaattttttcggtttttctatgccttagatgaatgcaggctcaaaattatacacaatgcaacacacacttcctgagccctcccccaaacttaaatcacacagtccactatgtgaataaacttggaagagagtactcaggacaaatccaatcacagaaacaaaaaatgaagaaacaaatcacaacagacagtataatacaatggtgaagtgaggcgcttacctcagtcgaagaatgaacgtagttgctcgtcaatggctgcctgcgattgctcccaggccatagacgaacctccttgttctgtatcagctccagcaggtgggtactcgacctcatcagctctgtggcggccagcaccgctctgaggaaactcgacctctctccttctgctgcggccagcaacgcggtcgagtgatctcctcgagtgaatgaggcgtgatctgctgctagatcgagtgagtgtagccttccttcttctcttgtgttcccgggattcgaatgacgaatgcctagcctggacatgtgggactctctgctcgctaagctcaggcctgtgcgcaggtgcattaattctcctcgatggcatctccataggaggttgtacctgtggaatagcagtggtggaggaagagcaactcagcttgtctgtcagaagcttgaaacacttggcgatcagcttgtcctgcttcttgcaccacttctgcaatttactgttattcttatgagcttcagtcaagctcttgctctgcctcgctggaggtacatgttcagcaaagtgatacatgctagtgtcgaacttcactgctccatcttcatccatcccatccgaagcagcttcttcaagaagatcgtcctcatctaatggtggagcgttctcatagtagaggcgtccaatctcaggcctaaaatcaatgttatctccctcgattatccgtgtgacctcagggctagggagaaggatgttagctctcctgtctgtagagtgctcaaacctgaacctgtggaaatcgtcaaccattgcaaactccaggaattcgcagtgacgtaggtgctcgatatccattgctcgcggctcgagtccagcagaaatgagtgggactccacaagctatcagaataggtgtcaccacgccacctatgcacagagcgcctcgtgctctcttgcggttattgctgaccgcccagtttttgtatccacacagatggatcagaagaagtatagagagaggtgtgtcattgacttcaccctggagggacatgccatttttagtttggcgaagagttcctttgagggccattgcgatcatctccatatcagagttagtgacagtccctgtaatctctcgggagtagagtacgttggctacagaacgctggaagtacctgatgacagggctgcgtatctgattgctctttgaccaggaagcattcaacggtacagagctgccaatggtgatccacaagtctttcaactcttctctttcatactttggcttagatcccgttccactggggaaatcaaacaatccttccaatcgcttgattgataacctgtactcatgaccatacacagaaaatcgcaagaatcccaatccttcacaatccaactcatcagaggtcataccttggtagagctctacttgcagtgtggagaggaattgtattgtctcatcttcatatgctacatacggataagccatcaaagtgtccagatgacaactttggtacaggtgctgaacatcttccaacaatccgagttgtgcaagtgaggtcgagcaaggatacctcgtgctacagaactcattcagcttgaaaagcttaacatattcctcagtaggcaatatgtcgggcttgtgcagaagtttggtagctctgcgagtctgttcaggcatgtactcgtcctccagatcttcgtctataagctcatacctctctgtcatcgctctctttcctcgggctatctcagctttccttctgaaactttcgtattctctctgttctctctctggccttgaagatgacgattctgtctcatccatgttgtagtcaggatcaacagaagaactgccactgtaattgctcatgattctcctgtagggatttagaactcaaagctcaaatgtcaataggttagtctcaaagatagcaatgaaaccaaaattattgtcaataggcaatgaaacagattgaataggtcgagtacaattccgtcctcgagtaacctgagctgttcctgagcttagatgaaatgaatcgagtatcttctcagaggtcgagttgggtgcttcagcaggtcgagtgaaacgtagagatagagtgaatcgtgaaagctagtggtcgagtagcttctctgaagttggaaggctctactgaattcacgaacaagaagccgagtagattattgcaggggtcgagtgctttcaggaggtcgagtgatttcttgaagtcggctaggacggcgtcggtcgagtgcctctacgagaccaggaagcgaggttgagcggtttcttttgaaagagacggcggttgatgccgatgaattggtcgagtatacggaaggaatcgagtgaagtggtttagtcggttgacggagtggatgggctggtgacggcggcgagggagggggtcgagtgaagttctcagtggtcgagtagctctttggacggcgatatgtggtgtagagagattagagtgtcggcggtgaaatgaaaagtggaaggtcgagtggatttggagtggtcgagtagcgcttcaaaatgagtggtctaggttgagttttagattctctctccagcttatcctcagcgcgtggtccacacactgttaattgagaaaatttctttgcagaaaacctactgtaaactgtaggaaatttctgcaagtctctgtagcttctgttggtcgagtaaaatgatgatttaaaaatttttgggttttaaacatcacatatactcgaccactgtactcgagtgcagggtctcaggtgcaacagaagattttcaaaattttgtactccaacgggctgtacactcgatctccaggtcttctgtagagtaaaagttttaaatttttactctatctccgggttgttctcttgtctctgaaaaccacaaacacaactaaaacaaatcaaaaatatcaagaaggtaaaaattatttacaaggatagtcatgggacttcctcccaagtgagcttgtttaaagtcattagcttgactcctttactcctttaatcatcaagaagctcctagagatgaaccgatgtcacctctggaaggatttggtctgctaagtatttcttgagcctttgaccatttactgtaaaatctccactcttaccagctagagtgactgctccataaggacggacctcagtgatgcagaaggggccagaccatctggatttaagttttcctggaaagagtttcaagcgagagttgaatagcagcacctgatcaccaacctggaaatccttagtgatgatcttcttgtcatggaaaagcttggttctctccttgtagattttagaactttcataagcttctagacggatctcatcgaggtcactgagttggatcaatcgcttctcctcagcagtttttatgtcaaagttcagaagttttaccgcccacattgctttgtactcgagctcaacgggtagatgacatgattttccatagagaagattgaaaggagttgtacctatgggggtcttgaaggctgtcctgtaagcccataatgcatcatctagctttgcagaccagtctttccttgtaatcccaacagtcttttccagaattgtttttatctccctattggagatctcaacctgcccgcttgtttgtagatgataaggagtggcgaccttgtgctttaccccatgcttcttcaagaggttctcaaaaaccttgttgatgaaatgctttccgccatcactgattactaccctgggaactccaaatcttgggaagattatggttttgaacaacttcagcacaacttttgcatcgttggtaggactagcaatagcttcgacccatttcgatacgtagtctacggcgaccagtatatatttattaccgtatgaagatgggaatggacccataaaatcaatcccccatacatcaaagatctcaacttccaagattgggttctaaggcatctcatttcttctactgatgttgccttttctctggcaagaatcacactttgaaacaaactcctgagcatccttaaacattgttggccaccaaaagcctgcttgaagaatcttggacactgtcttgaacgtcgcgaagtgaccaccatatgctgagccatggcaatgcagcaggataccttccacttcatcttctgagacacatctcctgtagatcttatctttacagagagtgtaaagataaggctcatcccaatagtaatggtgtatgtctctgaaaaacttcttcctttcataacttgtcaggttgggaggctctactccgcatgctaagtaattgacgtgatcagcataccatggagattctccttcaacagcattcagttggtggaactcttttccactgtagctttttccgaagtggtttttcaattctcatcctcgacagatggtccgctgcgccattttcaatgcctttcttatctactatctccatgtcaaactcttgcaataaaagtatccatcttaacagtcttggtttagtatccttcttggcatacagatgcctcaaagctgcatggtctgtatagacagttacctttgatccaaccaaatagcttctgaacttctcaaatgcgaatacaacagctagaagctccttctcagttgttgcatatcttccctgagcgtcatccaacgttcggctggcgtaatatatgacatgaagcttcttgtctattttctggcctaaaacagctcctactgcgtaatctgatgcatcacacatgatttcaaatggatagtcccaattaggtgctcgaacaaccggagcagataccaaagcatccttgatggtttgaaaggatttgaggcagtcatcatcgaatttaaattcggtttccttgcacaatagtctggttaacggtctggctatcttggagaagtctttaatgaatcttctatagaatccagcatgaccaaggaagcttctaatgtccttcaccgttttaggtggctacagctgcatcatcacttcaacttttcctttgtcaacctctatacccttctctgatatcttgtgacccaatactatgccttccttcaccatgaaatgacacttttcccaattgagaacaagattcgtctcttcgcacctagtcaataccctgccaagattcaacaaacatgaggagaaagaggggccatagaccgaaaaatcgtccatgaaaacctccaccatctcctcgattaagtctgaaaatatagaggtcatacacctccgaaatgttgcaggagcgttgcataaaccaaatggcattctcttataggcaaaagttccataaggacacctgaaagtggttttttcttgatcattagggtgaattggtatttgaaagaaaccactgtatccatcaagaaagcaatagtatggatatttagccaaacgttcaagcatttggtcaatgaatggtaaaggaaaatgatctttcctagatgcagcattcaacttcctataatctatgcacattctatgaccagttatagttctagtagggatcagttcatctttttcatttttgacaacagtcattccaccctttttagggacgcaatgcactggagaaacccaagtactatcagagatagggtagatgacaccagcatcaagcagtttcaaaatttcttttttcactacttctttcaaattgggatttaacctcctctgtggttcaatgctggaataggattcgttttcaagatggatcctatggttgcataaactaggtgaaattcccttaatgtcggataacgaataaccaattgctctcctatactttctaagctcagataatagcaggttcacttcatcactatttaactcagcattaatgatcacagggtaagtagagtttggaccaaggaatgtgtaccttagaccttttggaagtggtttgagatcaactttcggtgccttaagttcagaccagtcatctgaagttggaatgatcggctcccaaggttcgtcggtagacaaggtcgagtggttgattgagtacgtcctcgagagtgcaggttgaactcgagttgacccttcttcgctcattaccattacctctgttgctggtccattcaattcctcaaagggttctgattcttccatcgctttatgggagtctaacagcttctggtatcccaatgtttccaaatgcagaaacccatcttcaccacttttggttaaagcactgttaagatgatcttcttctgccagctcttccagtaactcatcagctaactgatccatttcttcgatccaaaagagttgcccttctatggtaggcttcttcatcgcgtctttgacatcgaaggtcatcctaaagtctttgccaaggttcagatcaatcttccctttcttgacatcaatcatagctcctgcagtggctaagaaaggtctccctagaatcaacgggtccttgggctcttcatccatctccatgactacaaagtcagttggtatctccacagcaccgatcctgattgggaggttttcgagcaaaccatgaggaattcttactgatctgtcagctaggatgagggatatattgcaggacttgtattgagtgaaccccaatcttttggcgacagatagcggcatgagactgactgatgctcctaaatcgcataggcatctgttgaaagccaatggacctaaagagcacggtagagtgaacgaaccaggatcactaagcttcttaggaatgatcttcttctgtatgatagcgctgcattcatgactcaataccaccatcccttgcacttcttgaattctctccacaatcaagtctttcagaaacttgtgagagtctgggattagcgctagagcgtcaacaagaggtatccgtaactcaacctccttaatgttcttggcaaacatagctctatatttgtctgccaacgctttcttgtgacggccaggaaatggaagctgcagtttgtagggaggagggacaaagaccttttccttgtttttgacagcaactggttttggagcagttggtgatgctgctgggatgacaggccgagtggttggtcgagtaatgctgtcgagtggcggatcgagtgattgctcgagtgacaggtcgagtgcttgctcgagtgacaggtcgagtggtttgtcagcttgatctttctcgagacttaaatcctccccatcttgatcttcactgtcctcagtgaccgtctttggttcctccttagttggaagtgcttttccactacgcagggtgatagcatgagcatattcttttggattctgaactgctttgcctggtagttggcttgtctgttttgtagctgaagaagatgtagaatgtccctctaagtaacggactttggtattcagtgtttccatcttgacatggagatcattgtagctacagtccagcttgttatgtaactcagatatcttctttgccatctccatggagccagaggcttgcccgtgaagcagctgttgtagcatttgtttcatatcagcgtcaggagcagcagaaccttggtgttgctgaggtgcaaacccaggtggttgttgctggtagttcccctggaattgctgcttaggaatgaaaccttggttgtagggaacaaaaggtttgttctgactttgttgttgctgtggaggatacacctgatcgtgagggttagcaacgttggtgctgcggtaggagaggttgggattgttggttttgaagttgttgtatcctttgtagccaccctggttgttgttgatgtagcttacttcttccaactggttaccctccccatcttggacttcatactgctcatcatcaacaaggaagtgcacatgcttatgctggctaagaagaatcctgtccagcttgtcattcagcgctttgatctccttcctgtgtttgtcatcagagtcagctgttcctctgacggtcctatcacagtcttcgttgtaatttccatctgattgagcaaggttctcaaccaattcccagccttcttcaacatccttgttctggaaattcccattgctggcggtatccagaagcattctgatgcgtggtaggactcctctgtaaagagtgctgagcagagaggctttagtaaagccatgatgagggcattggttggtgtaacccttgaaacgctcccatgcttcacagaggctttcaccagtcttctgtgagaaaccagaaatctcatttctgaatcttgcagttctggcattggagaagaactttgacagaaaagccttcttacaatcatcccaggtggtgattgagtcatggggcatggggcagattcttctcccagatgtgtgctttgtctcccaaggagaatggaaacaaacggagcttgaatccgtcttcactgacaccattgatctttgttaggttgcagagcctatcgaattcatcaaggtggtcgagtggatcctccattggcaaaccatggaatttgttcccctgaatcatcgagatgagaccactcttaatctcgaagttgttattctggatagcaggaggtgcgattcccttcctctgacggtgatcacgtggtgcatctccagcaccaatgttggcatggccattttgctgattctgttcttcagccataacgagtggttgctgaggtacagggttgactgtggttctcctttttctgatttcgcgggctgtgcggttgatgttgtcgttgaaaaggaggttctggttgcctgttgatcgagttcgcatacagcagaggtgtacctggatcaagaagacaacaagaaaaacacacagtaagtaactgaaaagaaaattgaaaaagaacttgatctaagcaagtctgaaatctcaaatgtaacaaacaaacacccaattggcaacggcgccaaattgataataggtttttaagatcaattaatcgtaaagcactatcatgtcgttgtagtactgaaggttgtcaatccaaatgggtgtgatgctaacaatcaagatgtgatcagaagtcactaagtcaagccaagcaataacaggttttggtgtgttctagcagtcctaagtgaacatgcagaaaacagaaaatcaaacagaaacagtagaacactcgaccaacacagctctttgcagagcactgagtgaggtcgagtgaatggtcgagtaacagacagaaaatggaacagggtactcgattgcacagtctgttgccagacaactgggtggtcgagtaccaggtcgagtaacagtaaagaattgtagaaactaagcaacatgtgacaggatgcagtaaacagcagtagagtaaataataaaatcaatcagacaaagaattcctaaggatggggtaattgagtagtttcgtttcctcagtttacaggtgattgacatgctcaataaattaaccctagacaacaagttcattaaccaaatctaattgccaccgcaacagagactctcaagctaacctagtcccagactcaatcaccattgacgagagctaacctaacaggcattatgaatcaacaagttaaagcaaaaacgctccctgcaaccaataccttggtacagggtcacgaatctctggaattagtggttcagacatttcatcgaacaccttttgggcgcggaaatgtctgggctcaaattccagttgatcagaaagcaataggcattaagaacaactaatccagaagggatctatcaatcaatactcaatcacctagcatactgagaattctacactactctaacccatcctcagaaacctattcactactcagacatcatgacagaaagcataaacgttgaacaggttgaagacatgataacagcagtatgataacagaatgaacaacagtaaacgaaaatcaagaacagaaactgaatactgaatactgaatagataaagagaaatccggattacaaaaagtctagaacacaaggtctgcggaaataaaaactagggaaaaacttcttgttctcgaaaatgagaagtacatgctacttatagccaaatatcccgaaaccctaatactcaaaacgacgaagtatttggacgggttaagcactgtactcgaccaacgtggtcgagtgaatagctggagtcttcttttcttccttgtgctcgagtgtctggttgagtgcagaatgaagaaggctctgaagcttgtcatcgagtatgcagtcgagtggtgtgatggaggtactcgacctctaggtagagtgaggaggtcgagtggttgtctgatgatggaggtgaagacactcgtcctcatggtcgagtgaagtgatcgagtgactgtctggtgatgagatgatggcactcgacctcggggtcgagtggtggttgaattggtgatgtcctctactcgacctgttggtcgagtggtctcttgagatcttgaagctcctactcgacctctgggtcgagtggtttgtcatgatcaggtccgctccttccagatagctcgtcaacagctccaaatcacctaaaatcaacgcaaatatgcaacatgcatgcaaaactatcctaaacatgcaaagtgatgacaaatgatgtgaaatggtataaaacagtgatgatatgatgctaaaatgatgacaaatggatgctcaaaacatgcaaaatacacacttatcacatcatttgtgtaatatagaacaacataacacgagtttagaactgaactaaactaatgaccaagaactaatgtaatcacaacacaacactcaacgatgtttgaccgattaacaacagagcatcaaacaacaataaaacaggcattactacataaactaatgagtctagaactaaacttgactaaatgcctaacccgaaaacactagcaacacaagagccaacaatgtttcacaacacaacagccaacaaggttcacattttcggtttgattccaaagccaacaaagaaagaagtaaacatgttacaaaagtgaacaaagttatgttcccaaaagaaatacaagtcacacacgactataaactatgttccacaatagtactgtctcaacaatatagcatcattcacaatcaaagcatcatcatttgtgtaatatagaacaacataacacgagtttagaactgaactaaactaatgaccaagaactaatgtaatcacaacacaacactcatctatgtttgaccgattaacaacagagcatcaaacaacaataaaacaggcattactacataaactaatgagtctagaactaaacttgactaaatgcctaacccgaaaacactagcaacacaagagccaacaatgtttcacaacacaacagccaacaaggttcacatttttggtttgattccaaagccaacaaagaaagaagtaaacatgttacaaaagtgaacaaagttatgttcccaaaagaaatacaagtcacacacgactataaactatgttccacaatagtactgtctcaacaatatagcatcattcacaatcaaagcatcatcatttgtgtaatatagaacaacataacacgagtttagaactgaactaaactaatgaccaagaactaatgtaatcacaacacaacactcatctatgtttgaccgattaacaacagagcatcaaacaacaataaaacaggcattactacataaactaatgagtctagaactaaacttgactaaatgcctaacccgaaaacactagcaacacaagagccaacaatgtttcacaacacaacagccaacaaggttcacattttcggtttgattcacaacagagcatacagaacaagaaaacagggaatttaaagtgaacttaccattcggtttttggccggggaatgggagacaacacacaacaccacgcttctctgccaggcacagagagaatgtcattcagagcaaccacggagtcttcttggagctacggcaacactgcaggaatgccctcttggaagttgttgccttgagacgagggatgactgtgagatgcagtttctggatccggcgaaagaggagggtcttgctgagcagtctcttgtggtggcaacggatctacacgctgtggttgattggtggagtgttggaagagttgctgcggtggtgggtagttacggtagtggggggcagaggatgaggcgccggcgccggctccttgaggcggaatcgatgcagaaacttgaaccgtcaccgccgccggggtgaaatcgtactgctgcggtagcgaagagggtcttccagcaggcgttgaacctccggctctttgagtcacgtttggtgtggtcttcctctttcaagatcctccacgaccggcgttaggcatcctcttggagatgagagaatcgagatggatcgaagaggcaagggagagtttggcgaagaagagagaatcgaagaagagagaatcgagatggatcgatgtattagggtttgttggtgaaagacggatcgatttagggttaagaagaagaagaagaagaagaagaagaagaagaagaagaagaagaagaagaagaagaagaagagaatcgatttagggttacgaagaagaagaagaagaagaagaagatcgaagaagatcgaggaagaagaagaagagagaagaagagaagaatcgaagaagtggctaagtgtttggaacgaaggggaaatgaatcgaattagggttttcaacactggagtagtcgtatatcagtcgcataatagtcactaaatcaattgggtttgggcttcgacgattaaaagcccaataacttacaccgttgtcgccccatagtcgccgaatcgtcaccatgtaaattgggttatgggcttagtaatttcgaagcccaacaacatacacaagtgtcgctgtgtagtcgtataattgtcaccacttaagttgggtttgggctttgtgatttcgaagcccaacagcttacaagatagtcactgtgtagtcgtatattaatcaccacctgagttgggtttgggctttgttattcgaagcccaacatcttacatggtagtcgcataatagtcgtaatttcgtcaccttatgcgttttaaaattatttaataattttttaataattattcaaatacttattcaaatacatcgtatattacaaaatttattcaaataattaattatacatctatttcacacaattattattcatcttcgtcttctatttcatcttcatccgatgacgataaattacatcggaattcatcttctggttcagcatctccaatatcgtaatcgaggatgattagggttacgtctgctaccggatagtctattacaagatcttcaattgtagtctgcaaaacagcttcatcatcctcggtttgcaacagtgtcggatcagtattttcatattgtccagaaatgtttccccttggattgacctttaaaacactgagccaaatgttctttggtttctttgtatatggatatggaatataacaaacttgatctgcttgagatgctgttcaaacatgttatacatatatcaacaaaaatatatacaacattatttattaatgaattagaaattttaagtatacttaattacgtaccaagaataaatggctcgtatttattgtatttcctcgtagatagaacatctacaacgccaccatggtttcggcgagttcctctcccgatctttggatcataccacttacacttaaaaagtgtgatcctcaaattgacgatgccctcatactcgagttctatgacatcagttaaggtaccgtagaaatctgcttcatcagatgaatcagcgtaattttcacctttaacacatactccatagttacatgtctttcgtccagcaccgtgggtttgcgtatgaaacaaatatcctcttgtaaaatacattggccaagttttaaccttgttcaaaggtccttgcacaatctcttgaacccaagtaggaaatggagaattagtgttccaataagttacctacataatatagataaacaatatcaatatgatcttaaattaaatcacgctagctacaagaaaacagacaaatagttacattcatgaaccaaaattactgtagacttacatattctttaacccatagatgatattcttcagctcttctgacgtagagttctttttcggacaaggatggatatttcgcagaaagataatcctcgaacatactgtctcaacaaacgaagacaaataaatcaaagtgatcttatctatgaataaatcaaagtgattaaaaatacctctcaaatggtttaaaatagtcacaatttcttaaaacatatgcatgtgcattttggtaatctttctctgaaagccagtctacatgcattgcaccacttggacggccgacctgcataaatatgttaggtactccagggacatgatatacaggaacttcaccttcattgaatcttgttaacctgccacatataattgaattaagatcaaagtagtatagcaacatgttaaataaataaaggtatttaccttgatttcgtttgtatatgatcggcaaagtagtgctctgaaaaataagcaatctcgtcattgatatatgactcaacaattgagcctgcagcatatcttttgttctttgcttttcctttcaactttttgaaaaacctctcaaatggatacatccacctatattggacagggccacccaattcagcttcgtatgggagatggataggtaaatgttccataacatcgaaaaatgatggtggaaagatcttttccaagttacagatgattaaaactatgttctgtttgagaatttgaacgcgacttgtctgtaaagttctcgaacataggtcccgaaaaaatgctccaattcctaaaatatatgtggaagttaaataattacataaaaaaatttctccataaaacatagttagaattgtacctgataatgcaaggtggacattccggtcaagaagttcagcaaagataaatggaagtagtcgctccataaaaacatgacaatcatgactcttcatgcctgaaaacataccattctccaaatctacacaactagccaaatctgaagaataaccatctggaaatctaacatcatgtttcacacattgaaataaactctgtttggcttcttctgtcaatgtatacggtggaaaaggagctttacccgtactatcaatatgtaagcctggccgagaacaatatttctcaatatccaatcttgacatgatattgtcttttgatttacccttaacacccaagagagtgttcatgatgttgtcaagaaaattcttctctgtatgcataacatcaatattatgtcgaagattgaggtccttccagtaagacaactcccacaatatgctttctttgtgccaattatgttccttcccatagcctcgcatcttcttttcatgaccgttcccaccaacatccttcgttttgggtggatttacactagccaaccgctcgtaataaacttgctcccctgtcaaagattcgggtggatactcgctagaagcgtctcttcctttgagaaagtcttttttgttcctacgagatggatgaccatgaggaagaaatctacggtgacaatcaaaccaacatgtcttccgtccattgggtagataaaaagactttgtactttccatgcaaactggacaagacaatttaccatgagtagtccatcctgataacatgctatacgcgggaaagtcgctaatcgtccagagtagtactgcttttagattaaaattctgactcaatgaaacatcgtacgcatcgactccagtacaccacaactcttttagctcctcaataagaggttggaggaagacatcaagactagctcgaggatgatttggtccagaattcagaatggtaagaaataagtactctgtattcatgcacatacgagggggtaaattatatggagttaggatcacaggccacaatgaatgattacgagacatgctaaatggattgaacccatcagtacacaacccgagataaacgttacggggttcttcagcaaaccggggatgtaactcttggaaatatctccactctgccgcatctgaaggatgattcatttctccctcctttgattggtgctcagcatgccatcgcatagccgcagctgtcttatggctctgatacattctcttcaactggtctgcaataggtagataccacatacgactatatggtactttggttcttcgacggtcgtccttaggcttccatctttgtgcgccacaaaatcgacattgatcttctttttcgtcttctttccaaaataacatacaattgtttttgcaaacatcaatcgtatgatatggaagtcctaaattgcgcatcaacttctcggtctggtaatgtgaagtggtagcctggtttccttctggtagaaaatctgtaaacatctcgcaaacggagtccaccaacttttcactcatattatactccgctttgttgtgcatgagtcgagatgctaatgataactgcgactgcccttcacgacaaccatcgtacaatggattatttgcaccttctaacaagtcgtagaacttatttgaatggttacggaccggctcttccacattctgataactaccatcatgatgatagcaatcatcatgacccacgttatcatcataccccacgttaaaattaaatgcatcgttcaccatatccacatatggatcttctacaacattacccacttcttcatgattctcactaaaatacgtcctatccgtgtaactagttccgatatccatattcaattcttctccatgcttataccaaacataataatcaggcataaatccttgactaaacaaatgactactaactcttctacccgagatgatgtgtttttcattcttgcatacactacaaggacaatgaaatttacctcgacaactctgtactataggctgactattagcgaatgtcatgaattcctcaactcctgcgacgtattcggctgacaaattccccgtcacttcatcgaatctcttgtacatccaatctcgatagaaaccgccactaccgccataattgtagtttcccgccattatagaataaactaaatttttattgttttcttttttttttcttttgattgttgttttgatttgtttgtgaaagaagagtgtcgtgaattttgattatatagatgaatttttatgactaatttatgactacaacaaacaaattaggtgtacctacttggcaatgcggaaaacgttttccaacaacttaatgcgactattctgcgactcagttgcgacaattgtacgatttcagacatgtgtcgtattttagtcgccgattgggcgactaacttccgcagtcggaaactgtagtcgtccatttgcgactatgtaacgacaaacgtttttcttatataatataatcgttaaatagtcgttgctatacgagtatttgccgactaacatatttagtcgtaaaataacgactaattgactactaatgttcatgttgtcgtatatgcgtcgtaaaacggtcgtgacgtagtcgccaaaaacgacgactacatctgttgtcgctttctgtagtcgttgtttgtctgttttcttgtagtgtataaactgcctcttagggttttcccgagggcatccgctattatccgttattatctcgcttttacattttcgcaacttttatagccgcagtgtttctcctgcaactttgtattttcactttcaaatatttgatattcagttttcgtttaagtctttcgtcatttctgttatcatgtttttaatcgttgctttgctattgtctttgattatgtctgagtagtgaactgtatttctgaggatgggatagaatagttgtggtttacttggtcgttttaggtggttgagtttagaatactagaatcccttctggattagttgcgcttattgcttgtttcactggctaatgtggagtatgagtccagacgtccagcgctcaggaggcgtttaatgggcgttggatcctattaattccagagatatctacctctatcccatgggattggctgtagagagggtattgattttaacatgttgattcgataatgcctgcttagttagagatcgctaaagggatttaggtcagtgtctagctttacttgaggatttctatcacgggagtgaattaatctgttgttgaacttgttgtctagggatagcttctgtgaagttttgtcaaccgcctgaatagattaagtagaccacactattcgattccccatccttaggaatcgtttatccatttgattgcctgttatcatttctgctttgtcatttacttgcctgctattgccatttctgcttttagtttcatttcatttctgttattgcatactaggactgttagaaccaaccaactttctgtttggcttgacttagagctttttgatcatatctcatctgtttgcatcacaccggattggattgacatcctaaaatagtacaacgataggatagtgttttagggattaagtgagtaaaatcctactatcaatctgtaattgaagtggtttttttgtagaaaagaaaaaaaaaaggaaaaattgccaacacatgtcacacaaaaaaaaaaattccaaatgtcaagatttgagagagtttagaagaaaccttctcatattatggaagacgtctcaagttaattgtattggacttcctctatgtttatattctttgtattttctcctcttattagtcttagtagattgataattaaaatttcatctcatatgaatttggtttgttctaaattaacctccttgcaagtgatggatttgggtcacaagaaaattctaccataatatctaacactccaaacactatgtgtgctcaagacatgctattgcataagctttctatgccaatcagaaaatatcatgtcgtatctacaaatattgtaaaatccaaaaataaaaaatggtaaactaaactatacacaaattcggcatgaagagtatcccttgatttgcaattttggtggtgcatatgcaaccatatctcattttcacaacttttgtgttaaacctcagatccgaaatgttggtcctaaatctatagcccattaaatttgtagaaccgttgttattttaatacaaaagtcacaactataattttgccgttgtgtcgaacaatacaaatttttgaccaaaacaaaatttcgattgcgcaaacgcaaaatatttgttttctacattaaatattctccttcaggctttgaaatataacaaaaaaaaaatcacataacgccatctccatgtgcagttaatttatgcaaatcttagagcgccacaagtactctagtataggtgaactacttggcgatattgcttagctttaaattgtgatcccttaggttggctcaataacccgatcgtatcaaagatcaattgatactgtcacttggtactcaaggttgttctgtcattacgaacatgtcttatttgccaaaaacatttccatcatgtcacactcgcaactagtatattttaggttgcaaatggaaataagaaaacgtccaaagagagagaaagattaccagtgccggtccgagaatatttgatgcttaaagcaaattcaaaattaatgccccaaaattttctcgcaaaataaaataatatgaaatttattttgtttaagaaaattgaacagaaaaattgttaacaagaaaaaaagacagaaatataatttttcttcatggcgaaacataatcctccttgctttcgctcctgcaaattcattaattaatttttggtaatcgagcttcttaaccagttcttgttctatagatatcagcgccaaaccattcaatcgttcttgaggcacagtcgaacgtagataattttttatgagctttaattttggaaaagttctctccgcagaagcaattgaaaccggaatggtgagtagtatacgataagtgatccatgtgtttggataacaaccatccattcttttcaaaaaatccaacacttcgaccggctttgtaatctcttttggcaacacatcttttaaaagtttcagctccataaatagatcttctccatcaacatctgaatgaacatcatgcttcaaagaagcttcaagcttcatacacgatgtccttaactcatcatcttctgctaccttcaatctctttacaccaaacaaaaatccaaatattttttcatattcttggaattgctcgaatcttacctcaatagacattatagcttgatccattatattcatgaagtaatgaattctaaaactctcctttgcagtcttactttcatcaatcttctcaacatcctcaccaaatggcttcttctttttcaccaagcgcttcggttttataggaaagacctgctcaatctccatctcaatggcaatatgtgtagctttagctttggctttctcagtagtttttcaaataagtaacaagccctcctaactgaaaaatagcaacctcaagatccatatcctcaaactgtaaggatttgcttactatattcacagcagctagcaaatcgtaccaaattaccattccaaataaaaattcaaaccctccaattccatgtgtttcactctctgcaagagactcaacatcactcctgtgtcttggattatcactgtattctgccaaataaaaaagtgcatctcgtatctttgaagcttgatatcttattggtttaagactatcaatgcggctttcccaacgcgtttgagacaacagtttaagtgtaatacaattcattgtttctctacacttccctattgttggttgaagctgcaaatagacaatatattcgctgaacaattctaaaaaaagaaacagctttcttggattctaaaaaaagaaacagtgtaaggttaagactctgacatccatatggagtgtaaaatgctcttggatttgtatcaagcaaccttttctgaactcctttatgttttcccatcatattatgtccgttgtcgtatccttgtcctcttatatcatcaatattcaacttaagatcaatcaatgcatcttggagagtcttaaaaagtccctcacccctcttatctttgatgtgtagaaacgtcgagaagaactcctcaatcttaggtgaacaagttgacacatccacacatcgaattaagaaggtcatttgttctttacgactatcatccggagaggaatcaagaattactgaaaaatacttcgcatctttaatcttctttaagatcatcatcttggtctcattagcaagtaattctatcaattcattctgaatcttatgactgagaaaatggcaatgaatttcacctttattagcccgtcgaatttgttccttcattaccaaatcaaaacctccaatcattctaataaatgccaaaacatttccactattaggatcatcaaccttctccttagtttgttcagctagagtctttaccactgcaattattctcaccaatacatctctccaatattttttctccttcttaattgcctcttccatatggttatcaattgttttactcttttgcaatctcacttctatctccatccaatgagtcatggaaataatatgacgatgagttgtttcatgtcttttcagcctttgcgcagcatttctccagtcattatacccactacttgctaacaaagtaggatttgtttcttaatcgaataatttacagcaaaagcaaaagaccttatctttaactttcgagtaaattaaccatctctaacttgtttctctccattactcagtcttcttatttaagatgaataagtgaaacatctatcaatatcatctcttggaaaacggtaatcagctcgtggtcttggaggtgatcctttctcaaccaaataatctctcctttttggtcaatcttctcccaatttgctggattagtcatatccacattatcataaaaaaaaactataatctcatcaactttcttatcaactctctcatcttctttcatgttttcaccctcgacccgtttttctctattctcattcatacgatctacatcatcctccatcactttttctgtacttttctcatctacattatcctccatattaataggcccttcaccttccttatcaacctcaggtctagcagtctcatcaattccagaattttgagttcttgtaacttaccttagcatatcaccaatttgagatttttctcttcctattttgacttccacttggctgacttctaccttccggtggcattgtactacaaataaagaataactagattttagaatgagtatacaataatagaaacaacaaaaagattaagtgataacataaacacaaaacaacgatatcttatcactttgtctagtttgtcgccgtcgccgtggctcttgatcaccgttaacccttgtcaaaaaccctaaaattttaatgggttaagccttgtgaatttgggttggctttgtaaattttttaattgggtttgtagatttgttaatgtatttatatagtgtaataagtttgggctttgttttaagcccattttcctctttttttttgtgtaattcggtttaaattaaccaaaataaacattcagtttaattttgaaattaaatttaagccctataaccgaaccgaataacccgtgtaccgacagaaccgacccgaaccgaaattaaatttcggttcaattcggatagatttttcaaaaactgaatttctccaaaatcgaataacccgaaccaaataaaccgatttctccgaactcccagggctagtatatactgttgattgcagatcttcatgttttgttcacaatattgaaccacaagcggttcatgaatattttttaatattaaaataaatttcacattacattgaatttataatgttgaatgtaacaaagactcagttcatctgtatcaaacaatacgaccgctttatttccactctccactcacagcctatacgttgaatggtaaaaacggatcagacgacatagataaaatatttatattataaaaaacttaatatttacataaactatacatactaaaacttttatattaattttcaatattcttttacatctttttaacatgtaattattaggtaaacgtaaaaatattttaatattattgactgtttaataaaaagttatgattgcataaaatgtttaatcaacataaaaataattatgtcatttttaattttctaaaattaataattttagtaaatgatctcaaatatatattttggatttatatatccattggagtaaatgaacatctttgaatatctcaaacatatattagtgtaaagcatacaaatataagtacataaatattttttaaaaggaaaataattataaaaagtaattgaaaagtggagcaaatacaaaacacaacaaaaaggtaacgtatctactgtagtagacatatccaaatatgtcatgacaaatctctctccgctttaactatacctctaaacaatattattttttaatttaaaattgaaattatctgcttgctataaaaattaacgtgaatggtgaaacataaaaacagtacgtccgctttgtctttgaaccgtggttgaaccatgatttcattcacaaccaatgtgttttaataattttgtagattttgtgtttatgtgaagattttaatatatatatatatatatatatatttatctgttgtttgttttctatgatattctatgaggatgtccaaaacgattgagttcgaaaaacatgaagggtaaaaacatgttaagagaagtggtggatcatggaaatcgacgtaagcattgaacttaaatggaattgttatattttgtttttatttttttaaaaatacaaattaaatgaacccatcaaatactcgtaatgcatattgtgtatatatagtcactttactatgatgttctacttttggatgaattacgtaaactggaaatataaagaaaaaaatatatttccaaccaaaaccaaaatcaaaaactttagaagaatatatgtatattatatatatatatatgatatttttattaattaatttttatcttttaattgacaaaatattgttggacttttttaacaagtcacatggtttcatcccatctatatatcacattgactttttccactttcatcctgacacttgttcgttgggggttaaagggaagaatctgtatggatcgctcaaagacaactttgagcatctgaaccattttttaatgaacgagggcatgattcaagaggaagactacaagtgtattgtagaaaaagaaaacaaggaaagaggaagcagctcaaagtcaaaacaaaacaaaaagaaaatgagttccaagaaggaaaataccaaaactgatccatgttttggaaatatgaggttaattatcaaatatattaattattatatcttttttaaaggtaatcagatatataatatatgttttatttttccaggataaaaaggttaacaaaatctggaatttggaaactatgagagagattgatgaaagcaagttgattgagttactatagagaggaccagttactgtgaatatagaagtattagatgaattaagctatatacggggtgagtaaattacagatatagacatatacttttcaattactatacactatgattttcattaaaatatttcttataaccaaaacgacaggatgaagttcttagaggatatctaagaaatgatctagaagatcatttgattgagttgacgggttatgacactacttccgaaggcattaactaatttaaatttaaaaattcatacggtcttcgctcgaggaaaatggatttggaaaaaataattcgaaagagtagccgaaagaaacacgagccatctttagtcaatgtttacatgtatcgagaggtatacataatattttatttttttttacttggtctatgagtagtcaggtcacagttatactcatttttggttaatttttgtgtgcagcttctggacaaacgcaaaggcagagagagaggaagaagccattgatgagcgttaacaaaatgaaaataaacatattttaagtttttttttctctaaactctcgttttttttgttgacaatttaattattgtagtaaagaatttacggctagctagatcataatcagcatgtgcggaatatcatatttttaaaaaaaacaaaattctagattgatcaaaatatttcttctagtttgattactaatgcttaaatagattaagtttttctttttttggcaagatatagattcagttttagtttggattatttcatgtatattaaggtaggcgtaactattttggaatgagacactcacccgtcatgtatctgtcataaatttctcgtcccataatcagttccgtatatgggaaataaaagtattaacatcccatatccgtcataaatggaaaacgtgtaacaaaatacatacttgcatgattatgtgtgtaaaccaatttattttatgtagtctttataacccgaatttataccagttgggtaattagttagattttcagtttggtttaaaactatgttcacagtctattgattatttgttatatccttttagttatcttccttggtggactaatattgagtagatgttgatctcaaatcagtcgtatgctaatacttatgctattagaatcattcataactcctctaatctgcaaatatttatgatctttcaagttagagacaacttattgttttgtaaataaaatattatatttttatagatttataatgtgtcccttagctaaattttgcatattacattgtttaatcataatcaatttgatttttgaataaaaataatttttttgagatacatctataaaaataatttattattgatgcatagtttgttttaaataaaaacagtataaactagtttacattatttcgaaaagaaagatcatgtgaaaaaggaaaaaataaaactacaaatattttgaatgtataatttattgtttagatatttttggacctttatcaaaatgaaggcaataatgataattactttcaattttctattattagattttaattcatagtaaatataaatcttggttcatacataatctcgtttttaagtaattgtgaaaaaatattataacaaaattgaatcttacaaatatttttatttcagttttgtaaaaaatttacaattaaatcttaaaatcctcaattgataaaaaaattttataactaaagttttattttttgaattataatgataatattattttcttttgaattaaatgataatcagaccttcacacatttggtaatgaccccaaaattctaaaatctaatttatttatcaatcaattttttattattattagtagtatcaagctttgttcaataaaacaaaaaacaattaatggtgtcaagcaagttttacgcttttaatccttttaataaaaattagtttccaaaattttaattaaataatatagtacaattggatattaaaacttagttttccaattctcattgattaacaatttattagaaattaatttcaaattttcgtccacatttaataagagttaaatatttttgaaaactaattactttttttaattttattttatttcttatttatatatattaagtttttgattactatttagtgaattccaataaatagtatacatgagtatgtgacctaaccataactaaataaatgtaaaaaaaattcattgtcttaaaatgtcagaattaacaagctttcttgattttattaaaaaatttcaaaatgaaagattgagaatgttcttctgagttttttcaaacactctttatattttttttatcaaattgacaagtgaataataataaaatcataggaaatgtcaaatcttcttacaaaaattcatctcttaaaaccaaaagaaaaagaaaactttcacagtttaaatgatcaatcaaatcacttacacgttgataatgtcaaaggttttggaaatgattcatattttctttctcttcgttctctcacttttttttttctctttctttggttttgctttctctctctttcgtctagtcttcacatacatatagctccgaatggagaaagcgtatcaggcggagcagatttagcgtatcaagtagaacaaaagcggatcaagtagatctaactgtacaagtgcggatcaagtggttcaaacacaagtggctccgaatggagaaagcctctttcgtggagaggatcaagcatttcaagtagaactaaagcggatcaaacggatcaggcgtttcaagcacaactaaagcggatcaagcggttggaacgcttcaaaatatgtattgaatggtaaaaacggatcaaccgatgcagatgaaataatttattgtaaaaatattaatttaaaataaattataatacataataaaaaaatattactaaatttacaatattagtctaacatatttttaaacatgtaattatataattcagttttaaagtatttatatagttttattcattattttggcattataaataccaaataaaatgctaataagtataaaaacaaattaaattttaaggaatgttccactattaggcacttttaaaaaatgttttcccgtttgaggcactttatagggaatagacactttttatactaattctttttcttttggactttttcaccctcaattcaatctttatgttgattattctcaatttctctttcttcttaatcttcttccactatctttacccaaaataaatgaaatttttctctctctctctctctctctctctctctctctctctctctctctctctctctctctctctctctctctctctctctctctctctctcattccatgatttgtagcgcctctctctctccacgtctccataacttttgggctcgattcctcttatcgattatggcagcggttcaccatcggtggtaccgattctgcaaacaaatgggagaagcttcttaaacaattcgatctcgattatctcaggaatttggtaaaagttctatgtccataaggtcttggaggtggaaggtctctgcaaacagtaagaaaaatcaacaaataatttttgggtgtccataacaactagtctatttaaatatatccattaagaaaactttttactgattcatatccattctatataccatgtccataataacaggaaattcgattaatcgtggtttgtaaagaaaccaaagttccatgtccataaggtcttggaagtggaggtctcttcaaactgaaagaaaaatcaacaaacaattttttggtgtccataataacgagtccatttaaatatatccattcagaaacctttctactgatatatatccattctatataccatgtcaataatatcatgagattcgattaacagtgttttgtaaagaaaccaaagttacatgtccataatgtcttgaaagtggaggtctctgcaaattgaaagaaaaatcaacaaacaatgttttagtgtccataataacgagtccatttaaatatatccattcggaaacctttttactgatctatatccattctctataccatgtccataataacagaaaattcgattaaccggaatctcgatgctacatagatgaaacgagtttgacacatgagagagggcaaaactcaaataaagccgccattgttgaagaatgataataagttttgatgtcaattatcctaaaacaccaatcatgtcgttgtagtattttaggttgtcaatccaaatgggtgtgatgctaacaatcaagatgtgatcagaagtcactaagtcaagccaagcataacatgttttggtgtgttctagcagtcctaagtgaacatgcagaaaacagaaaatcaaacagaaacagtaaaacactcgaccaacacagctctttgcagagcactgggtgaggtcaagtgacagatcgagtaacagacagaaaatgaaacagggatactcgactgcacagtctgttaccagacaactgggtggtcgagtaccaggtcgagtaacagtaaagaattgcagaaactaagcaacagatgacaggatgcagtaaacagcagtagagtaaacaataaaatcaatcagacaaagaattcctaaggatggggtaattgagtaatttcgtttcctcagtttacaggtgattgacatgctcaataaataaaccctagacaacaagttcatcaaccaaatctaagtgccaccgcaacagagactctcaagctaacctagtcccagactcaatcaccattgacgagagctaacctaacaggcattacgaatcaacaagttaaagccaaaacgctccctacaactaataccttggtacagggtcacgaatctctggaattagtggttcagacatttcatcgaaaaccttttgggcgcggaaatgtctgggctaaaattccagttgatcagaaagcaataggcattaagaacaactaatccagaagggatctatcaatcaatactcaatcacctagcatactgagaattctacactactctaacccatcctcagaaacctattcactactcagacatcataacagaaggcataaacattgaacaagttgaaaacatgctaacaacagtgtaacagcaggatgataacagaatgaacaacagtaaaggaaatcaagaacaaaagctgaatactgaagagaaatccggattacaaaaagtctagaacacaaggtctgcggaaataaaactaggtaaaaaacttcttgtctgcgaaaatgaggagtacatgctacttatagccaaatatcccgaaaccctaatactcaaaacgacgaagtatttggacgggttaagaactgtactcgacccaggtggtcgagtgagaggtcgagtgaatatctggagtcttcttttcttccttgtgctcgagtgtctggttgagtgcggaatgaagaaggctctgaagcttgtcatcgagtatgcagtcaagtgttgtgatggcgatactcgacctctaggttgagtgacgaggtcgagtagtggtctggcagtgaaggtgaaggcactcgacctcatggtcgagtgaagtgatcgagtgatggtctggtgatggagatgagggcactcgatctcgtggtcgagtggtgaagtgaagtggtgatgtcctctgctcgacctgtgggtcgagtggtctcttgagatcctgaagctcctactggacctcttggtcgagtggtttgtcgtgatcaggtccgcttcttgcaaatagctcgtcaacagctccaaatcacctgaaatcaacgcaaatatgcaacatgcatgcaaaactatcctaaacatgcaaagtgatgacaaatgatgtgaaatggtataaaacagtgatgatatgatgctaaagtgatgataaatggatgctcaaacatgcaaaatacacacttatcaattcccccaaacttagtctttgcttgccctcaagcaaacattcaagaacaagctggaagtgaggtttgaaagcggggactcagagccaaagcaccagatagacgagatgaaatcaatgtccaagttaaaagttctaagctgcaagatcgaattctacttaaaaacgttagccatgcctcatcaatcaatcaatccgactcatatgctcgacctacacaagttttcaaatctatcaatccctttaacattcattagttctggaacgtgaatcaagcaatgcatcatcaaagaactcatttggctaaggtaaaaggtcaagagacaaagatggtcccttacagaataggcttcagtaacaggggatctctcaaaaaatgattaagctttagtagaatgctaaaggtaagtcccaagctatgcatacagagataagatcccatctacccagagtacatcaaatgaagctctaatggtaatcccatctccaatcccaatacaagaactaaactctacccttttcattcatgaatcttttaagcactttttctaatcattcttttcttttctcttaactctaggagaagctttctcaacactttgttacatctagcggatttggatttctttaacaactaaggttcctgtttttaacattttaaagccaagggcttttgcccatctccaatagctaacaagaactctttcttttctttacaaatcccaaaacctttactagactttttctgcttctttagcttacttcacctagagtcttctaccttttcttatcattgaatcaacccccttttttttttttttttcttttaaacacatcccaacccaaagtataaacacccacctagtcctatccagtccaaaaaatgcgaactagaactacatgagacactatctctgtcgttacgaacctaacactttctaccaagcttaatcggaataagacctcacaaacactcacaagtgatatacggcttgaaagaaagtctaggtttgggtttgggttaactgctctaataaggagagtcagctacttggattaacaagagtgatcaaaatgaataagagaatccaagtattttagggtatccatgagttcaaatttgatgcagacatgataattaaagatcagattcaggttcaaattgatagggaatggtatcagatcatgacagtgtggtcgagtagagcaatctaggcatggttcagttttatttcaaactcattgattacgcaacagacaactagcaacgagggcactgagtttatccggtgaatcaaaatgcttacaaggctatctcatcatcatcccctatgcatatgcaacaatcctaaatgaaacactctagactcgatcctaaatgtgatgcaactacatgaacactctttttttttttttttatgaaatcattttctgaaatttttcaaatttttttggttttttctatgccttagatgaatgcagactcaaaattatacacaatgcaacacacacttcctgagccctcccccaaacttaaatcacacagtccactgtgtgaataaacttggaagagagtactcaggacaaatccaatcacagaaacaaaaaatgaagaaacaaatcacaaccgacggtataatacaatggtgaagtgaggcgcttacctcagtcgaagaatgaacgtagttgctcgtcaatggctgcctgcgattgctcccaggccatagacgaaccgccttgttctgtatcagctccagcaggtgggtactcgacctcatcagctctgtggcggccagcaccgctctgaggaaactcgacctctctccttctgctgcggccagcaccgcggtcgcgtaaactacgagactgcagaagtcgtccgctcctactgttagatcgagtgagtgtggtcctcctcttcctcccagattcacgaggctcgaatgatgaatgcctcgcagggacatgcagaatctcctgctctctaggctcaggcctgcgccgacttggctcgggcgcgtcatatctcctcgaaggcatgtcctgagggagatgtccctgcggaatagctgtagtggaagaggagcagctgagcttgtccttcagaaacttgatagcccttaagcacttggcgagtaacttgtcctgtttcttgcaccacttctgcagcttgctgttgttcctgtgagcttcgctcaaactcttgctttccctcgcaggaggtatatgctcactgaaatgatacatgctcgtgtcaaactccgcctcatctatatcatccgtctcatcaacatcttctgttgtagctccttcggtgtgactaaactcctcagttggcggactgccctcgaaataaagatcttcaagcgcaggcttgaagtcaatgttcctgccctcaagaatcctagtagcgtcaatgcaggggagaagaatgttggcgattctaatcgatgaatgctcgaacctgtagcggtgaaagtcgccagccatgtcaaactccaagaactcacatctgcgcaaatgatccaagtccatcatcctcggtgctaaacctggttccttgagggggactccacaagcttccagaattggcgtcacaacgccacccacgcatagtgctcctctcaccttcttcttcccgtttgtcaacgcccacttcctgtatccacacagatggatcaacagaggcattactggtggtgggttgttgagatcgcctctcaagacattcttccccttcgtctggcggagaatccctgtaagcgcataatctatcatctccatgtccgtgttagacacggtgcctgtagactccctggagtaaaagatgttggcgactgatcgctgaaagtagcggatcacaggactttggatttggttgctcttagaccgcgccgagtttagcggtagattgttccctatagtggcccacaaatccttaagctcctctctgtcaaatctgggtttggtttcctttccactagggaaaccaaacagttcttctaacttcttgatcgaaagctgataccgctgttcattcactgagaacgtcaagaagcctaatcccatggtatccagctcaaagtctgtgagtgcttcatacatctccacttgcagcgtggaaagaaactcgattgtctcctccttataggcagggtaagggtaagacatgagtgtctccagatgacacttctcgaacaaatgctgcacgtcctccagtaaccccagctgggctaaagtctcataacacggatacctcgttccccagaagtcattcatctcgaagaatctgatatactcctccactgtaacctcgtcgggtttgttcagcagcttcgtctccctgcgccatgactctggctcatactcagtctcgatatcctcatcaatcagctcatatctacttgacatcgccctctttcctctggcgatttcagctcttctctgattacgacgggctgtagagcgttcgaattcatccctgaagctctggtaaacatgttgctctctcggtctagcggaccaggactcagcttcatccacattgtaatcagggtccatagaggattctccgctggtgttactcattacggaacctgaaaacaaaattaaactcaaagatagacgttaatacgttagtcccaacaaaaccaaaaacacaaaccaacagagtaaaacgatcgagtgtaccaaaattttttattttttttttttcggtttggtgaactcgcggtctagtgattccttggttgtgcttggcgatcgagtgaccttgagaggcgagagatggtgaagcggtttgaaagaggtcgagtttggttgcttaatcgagtgaaccggcgatgacgagctttcgtggggatgagagcagcggcgatggaaacgatggagaggcgttgagaagcggcgagatcgagtgactacgcaaggtcgagtatgttgagagatggcggtgagagcgatgaagctgtgaaggagcagcggtcgagtgaacttgagctcgcggaagagaagaaacggtggtgttgtcgagtgatggctggacttgagagatgagagaacgatggcaccttggtcgagtgatgtcgtagatggagagatgatgagcttaaaggtgataagtgttcaacaatgaagagaccgagtgatggtggaggtcgggtgatggagggacaaggcgatagggtcgagtgatgaaacgatgaagaagatggtgatgtgaagcggtcgagtggtagtggagaggtgatgagagcttcggccgagtgatggttgtgggattggcgaggagtggtcgagtggttttgagcgagaagtatggggacggagaacgagtgtttgttgagcttgagagtgagagttgatgagtgaagtgagagtcgagtggtgttgggatgaaaataaaagggagaagtcgagtgtttttttttttaaggaaggagaaggcggagaggtcgagtggatgggagtttgttttgtcggtggtgatgaatgagagtgatgggtcgagtttatggggttgtggaggagaaaacgaggcgatgaggtcgagttaagagggatggaggtcgagtgatggcgttgacgtcgagtggaggagaagagatgaggagagatttcctgtcctttggtctgttgcatggaggacatgggcgtcagcggcgggtcccagaatgtcttcttgtctcttctctgtattctccgttcactagaaaaactccaggaaatcccgcaatcctctataaacttgaaagattccctggaagactttgtagcttatgttggtcgagtaaaatgatgattaaaattttttttaggtttttaaacatcactcatactcgatcactatactcgatctctaggccatcagttgagtaaaagttttgaatttttactctaccttcacgttacccctttcttcctgagaaccacaaacataaccaaaacaaatcaaaaataacaagaaagtaaaaattatttacaaggatagtcatgggacttcctcccaagtgagcttgttttaagtctctagcttgactcctcacacttatcaagaagaaaatgaactgtagagagggtcagcataatcctctctgataccatcatcatattcagcgtcctccctggagaggtctacagcagaatactcaatccccctttcttcaaaataggcttccttctcttctggagggtaatctgcatcttgagaccatcttgaagtgaattcttttctcgcgatagtgttaatcccgcctttaggttgagcttccttctgcatctgattcagcttactcctaagttcctcaatagtgtgggctagcttctctatagtttcatcttgcttatcagacctctttttaagttctttcactctttcagtctcatatccttctcctgagatcgctctatcatttccagaggttcttccatcttctgttgacccttgtggagttctgctgatgttaaagtgcaacttgatgtgctttccaaggttgagacctattttcccttctctgacatctatcactgctcccactgaagctaagaatggtcttcccagtattaagggatccttatgctctacttccatatccagcaccacgaagtctgtaggcacttctactccattaatcatgactggtaggtctttcagcatgccgaagggttttctagaagacctatccgcaaggatcaaagtcaggtcacaaggtttatattgaatgaactctaaccttcttgccacagagagtggcatcaagctaacagaggctccgagatcgcacagacaatcgctgaaggcaaattcttcaatggaacatggtagagtgaaagatccaggatcttctaacttctcttgaacaatcctcttatcagcagctcgagatggagtggcatcactttcatcatccgaatcgtgatacatcttgatcctttccagtatcaaatttctcacatctttgtgaggatcaggaatcaggttaagaacttccattagtggcatcactccttcaatctcgtccaactgcttcgctgcaatagacttgtatctctccatccatgctttcctgaatgtccacgggagagcacgtgagggtagtggagtaggtttgaatcgttttaccattctctcgattatggcggccttctcttccgaggtggattgagtgagatggctagaaccagcggaatggttgaattcaacaacagagacttcaacctgagtacaagcctccccttcttgaacatcactgtccccagtgacgaaatcagggacaggtcgagttggcagctctcgatcatggcaaatggtgatggcgtgagcagttgcatactcttttggattctgtatggacttccctggaagtcctgtaacttttggtgtagaggtagatgctgattggccttccaagtatctgactttggtattcaatgcctccactttggcattcaggtcattgtagctacagtccagcttatggtgcaattcagataatttcttagccatttccattgagctagatgcttgtccctgtagcagctgctggaccatctgtttcatttcagcatcaggaccaacaggaccttggttttgctgaggtgcaaacccaggtggtggtggttgctggtagttcccctggaattgctgcttaggaacgaaaccttggttgtagggaacaaaaggtttgttctgaccttgttgttgctgtggaggatacacctgatcctgagcattagcaacgttggtgctgcggtaggagaggttgggattgttggttttgaagttgttgtatcctttgtagccaccctggttgttgttgatgtagctgacttcttccaactggttaccctccccatcttggacttgatactgctcgtcatcaacaaggaagtgcacatgcttctgctggctaagaagaatcctgtccagcttgtcattcagcgctttgatctccttcctgtgtttgtcatcagagtcagctgttcctcttacggtcctatcacagtcttcattgtaattgccatctgattgagcaaggttctcaaccaattcccagccttcttcaacatccttgttctggaaattcccattgctggcggtatccagaagcattctgatgcgtggtaggactcctctgtaaagagtgctgagcagagaggctttagtaaagccatgatgagggcattggttggtgtaacccttgaaacgctcccatgcttcacagaagctttcaccagtcttctgtgagaaaccagaaatctcatttctgagtcttgcagttctggcattggagaagaactttgacagaaaagccttcttacaatcatcccaggtggtgattgagtcatggggcagattcttctcccagatgtgtgctttgtctcccaaggagaatgaaacaaacggagcttgaatccgtcttcactgacaccattgatctttgttaggttgcagagcctatcgaattcatcaaggtggtcgagtggatcctccattggcaaaccatggaatttgttcccctgaatcatcgagatgagcccactcttaatctcaaaattgttgttctggatagcaggaggtgcaattcccttcctctgacggggatcacgtggtgcatctccagcaccaatgttggcagggccattttgttgattctggtcgccagccatttcgagtggttgctgaggtacagggttgactgtggttctcctttttctgagttcgcgagctgtgcggggtatgttgtcgttgaaaaggagcttctggttgcctgttgatcgagttcgcatacagcagagctgtaccaatcaagaagacaacaagaaaaacacacagttagtaaccgaaaagaaaattgaaaaaaaacttgatctaagcaagtctgaaatcttaaatgtaacaaacaaacacccaattggcaacggcgccaaattgataataggttttgatgtcaattatcctaaaacaccaatcatgtcgttgtagtattttaggttgtcaatccaaatgggtgtgatgctaacaatcaagatgtgatcagatgtcactaagtcaagccaagcataacatgttttggtgtgttctagcagtcctaagtgaacatgcagaaaacagaaaatcaaacataaacagtaaaacactcgaccaacacagctctttgcagagcactgggtgaggtcgagtgacaggtcgagtaacagacagaaaatgaaacagggatactcgactgcacagtctgttgccagacaactaggtggtcgagtaccaagtcgagtaacagtaaagaattgcagaaactaagcaacagatgacaggatgcagtaaacagcagtagagtaaacaataaaatcaatcagacaaagaattcctaaggatggggtaattgagtaatttcgtttcctcagtttacaggtgattgacatgctcaataaataaaccctagacaacaagttcatcaaccaaatctaagtgccaccgcaacagagactctcaagctaacctagtcccagactcaatcaccattgacgagagctaacctaacaggcattacgaatcaacaagttaaagccaaaacgctccctacaactaataccttggtacagggtcacgaatctctggaattagtggttcagacatttcatcgaacaccttttgggcgcggaaatgtctgggctcaaattccagttgatcagaaagcaataggcattaagaacaactaatccagaagggatctatcaatcaatactcaatcatctagcatactgagaattctacactactctaacccatcctcagaaacctattcactcctcaaacatcataacagaaggcataaacattgaacaagttgaaaacatgctaacaacagtgtaacagcaggatgataacagaatgaacaacagtaaacaaaatcaagaacaaaagctgaatactgaagagaaatccggattacaaaaagtctagaacacaaggtctgcggaaataaaactaggtaaaaaacttcttgtctgcgaaaatgagaagtacatgctacttatagcaaaatatcccgaaaccctaatactcaaaacgacgaagtatttggacgggttaagaactgtactcgacccaggtggtcgagtgagaggtcgagtgaatagctggagtcttcttttcttccttgtgctcgagtgtctggttgagtgcggaatgaagaaggctctgaagcttgtcatcgagtatgcagtcaagtgttgtgatggcgatactcgacctctaggttgagtgacgaggtcgagtagtggtctggcagtgaaggtgaaggcactcgacctcatggtcgagtgaagtgatcgagtgatggtctggtgatggagatgagggcactcgacctcgtggtcgagtggtgaagtgaagtggtgatgtcctctgctcgacctgtgggtcgagtggtctcttgagatcctgaagctcctactcgacctcttggtcgagtggtttgtcgtgatcaggtccgcttcttccaaatagctcgtcaacagctccaaatcacttgaaatcaacgcaaatatgcaacatgcatgcaaaactatcctaaacatgcaaagtgatgacaaatgatgtgaaatggtataaaacagtgatgatatgatgctaaagtgatgacaaatggatgctcaaacatgcaaaatacacacttatcaaagaagaagaaggttcttcgagaactgaatctcaaatttatgtcaaaacaaagatttaaattgcaaaataaattacaatcttaaagaaaacaagggctcgtattctcgtattggtccagagagaagagaaagctatcgcgtagagtggatttgaagatattatgggaaaggtttttttctttgataaagtgagaaaaaaaaagaaaaagagagagaagagatgggaaaaggaaagagaagagatggccgatgaaaaaatatagttaaacggtaaataagtcaaataattaagagaatattacatgtagaggcactttttagaaagtttggccgcaaataggcacttcataagcattagtaactttcagtgatcgaaattacccctttaccctgaaatcgtcggtttatgaaaacctaagaaatataaccggttttctctatcttcttttatcacgatcataaaaaaaacacgaacccagtaaaaaccctaatttactgtttctccacattgcgacgagaagcgaatccggccactcctctgactccagcgactcctccgtcactgtccaccaatccgcgactccggcgactctatcctctctgaaaataaaaaccaaatagtcatttcccccaaatctctacaataatcgaattcgatttcgatttattgttttcgtaagccagatttcaatatcataccagttgattctgactgatcggaatactctatggaaggtacaaatcatttccaatcatctgattttggtccaattgactcagaagaagaaatcctcttgtcgatgaatgtttctgcaaattttttttttaaaatcgaaaaaggttttataattgtttgtagctaagcacagacgattatggttttagtattttgtccaaatactcgttaatctaatcgttatctcttaaactggtttcttgccaatgaacagggtcgacatctcaggaaccatcttcttagtgggattcaaaatttccaaatagactcttcgccaccgatcaatatccgaggggaaggctaaacttatactctagacaagatattctatcctttatcaggaaggtttttgatgggacagaggaattagatattattcttcagtcttgctttggatctctattccatttgccggttagtagggttgcgacttcgggtaaggtcattcatgccttgttatgtagacagttgcttactgtaacgcccgtgaaccagaaaatcggttagggtttgtttttaaatcatccggtttaattggttgggttaattggaaaccctagagtgtgcctataaaagaagaaaactcgaaattagggctttagttagccacttttcgttttataaaggagaaaaagagagaaagggagaaggagcagaatcgttagggtttgggagaaaccagtttcgtcttatcaaatcgtggtaaaaggtaacgaaatttggtagagttattcccaagtcgtttatcgttattctccagtttacagaactggatttgtattaatattggttgagttattcgcagtttcgtgagacacgttttctcagacgcgaattgggaccagcggagattgaaactaagatcgtggtctcgtctgttttccgatcggcacgagattttgtgggcagctttgtgacgtctgcggataagatttcaccggagcgattgaatagtaaacggttattttgtattttagggtttcgtctttgagactgcttgtttctggtttttcctgttcagtttgcttcaaggttgcttttggttgtggacttgttgtaggacgtttctggaatgtttcagacgcaaggagagtctctcctggatttaattattgttacgatcaatttgttaaggtgagtgtgtgaccatgagcttatctgagcgattgggttgtatgatttgttttgtgtgatggtatgtaggtgtggtgaatgtgttttgggtgaattgttcaatgactggtttgtttgtattgtattcgtgattatacctttttatttgcttgtgtgtatagctcgtagatgggaggatcgcctcactaagtatttatgataatacttacgcatctcattgtgttgttgatgcaggtaaagataaagtatgatcgtggaatcatggcaaggaagagaggatgatctaggaactcgtttgttttatttttggtgtttttggttattggaaaccggttaggattgtcagttattcttggttttgttggtcgaattatttatttattcataaaatgatatttttgacttacggtttaatttttatgttattggttggtttaattagatatttttgggaatatttaattatatttataaaaaaaaaaaaaaatggggtcgggttgtttcaatttggtatcagagcgattacggttctaggatgtgtagaaaaattaattgatgaattattttcctgatgattgatgtgggatgagctagggtgttagcatattgaggattgattatggagtgtttagtcaattgtgtgttgttggagtcctagcttcatcttctccgagccttaaatgagattccacggtaagttgtttgtgatatattcgtttgttttagtttcttagccatttgttcttgagtagcgcagatgggtagaggagctggagttcgtggtcgtggtcgtggtcgcggtaggagacgagtcctcgagggtaccggcgagagtaatggccacagtgccacagttgagcagagtgtgggttcgcagcatgggtttgtggagcctggggttaggaacggtcttggtgccgatatagctggtgcagccggagtgggggctggtggagctggtgtcggtgccggtgtgcatgtcgttggtgctgagggcccaagagtgatgggtgccgcaaccagaggagcccaggttccagaggttggtttggcgggcctactgagacagttgttggagcggttaccaggtgtggtaccagtgcaggttccagtggcgccacgagtggcaggggtgcagcagagggctgcggttgctgaggaggttccatcttatttgaggatgatggagcacttgcaaaggattggcaccgggtatttttctggtggtactagtcctgaggagaccgacagttagaggtcgcgggttgagcggaacttcggttcgagcagatgcccggcggagtatcgggtggatctagcagtgcattttctagagggggatgcacatttgtggtggcggagtgggactgccaggaggaggcaggcggatatgtcttgggcagatttcgtggctgagtttaatgccaagtactttccgcaggaggcgctcgaccgtatggaggcgcgttttcttgagctgacacagggtgagcggtcggttcgggagtatgaccgggagtttaaccgactcttggtgtatgcgggtgggggcatggaggatgaccagacccaaattagaaggttcttgaggggactttgaccggatttgagggtgcggtgtagagtgtcgcagtacgccatgaaggcgacactggtggagacggctgctgaggtagaggagaaccttcagaggcaggtggtgggagtgagtccagcggtacaactgaagaagactcagcagcaggtggcacctagcaagggcggcaagcctgcgcaggggcagaagaggaagtgggatcatccttccagagctggacagggtggtcgtgcaggatgtttttcttgtgggagccttgaccacaaggtggcggattgcacgcagcgagctgagacgagggagtgctaccactgcagggagagaggacatctcaggccaatttgtcctaagctgcagcggatggcaatggcagtggtacagccggcggtgcagcacggagcgtaggtgtagcaggaagtatagcagttagcacatattgcagcggcaccgcagggttacactacgcgtgagataggcggtaccagcaacagagcgattactggtatgatttctgagactcagactttgtgaattgtttctgttgttttggatatcattgttttgtgatgaatgttagggttcttagcacatgaggtttgtgtagggaccttattagtgggcggtgtagaggtccatgtgttgtttgactctggagcatcacattgcttcattaccccggagagtgcctcgcgcggcaacatccgtggggatcctagtgagcagcttggagccgtcaaggttgccggagggcagtttctagcggttctggagagagcgaagggtgtagatattcagattgtaagggagtcaatgccagcagatttgattatcagccctgtagagttgtatgatattagccgccatgggtttatttggttagtgggaagctatggtttctgatttgattagaattagagagaacgaggttaagggttacatgtaacggtttttggatatctaatatttatttggagttacttggtcaatggtttaataggtcagtttatataagtggagaagtgaaagggtgtttgattcagggttgagttttctgttttttcagtcattccaaccaacactcctgagtgtaatgaataatccataacagttggaaacataggtgtaggtgtatggtttgctgcatagatgggcttgaaaatgttgacaatcatcatatatctggtatcacaatatacattgagtggttgttttgctttttaaatttagtactttttcccgaagaatatgtttatagaaacgctaaacagatttttttttcgttttttgttttttgtacttaatcacatatgggtaagcaaactaaatatttatatttgacaattctgacacttagaaatgtaaatgtagtgtaaatgcgttatttataaaggaacaaaatattacagattaagaaagagtccttttattgtcattttaagttgaccattacatagttttttagtttgtcacatacgttagtttggaatggtgaacataggagaggacttgtttgataagtttattctttcagttttacagtacctgagtttagttgttaaacaatatatattaaacaaacggaatatcgacttttatattttctagagtgtgaagggtgttttcaaaagtaaaaggaagctgcatcttttggtcaaaactaaaaaatagcaaaaactttcttttctttggggtggcaatgtggaaattccattacgaaattgaaaagaaactaagaaaaaaaacacaattaaaaagtagacgtaaaagacaatgaaagaaacataagtagtgacattttagttgtcgagacggggacgtttgtccttctttccatttgatgaggctgagttagatgtttctgatttgcggtcagcttttttagttgtggcaataatctgacagtcaacatctccatctttggcgttttcttcacctgtttcaataggaatggcgatttgggtatcaatgatacgggagatagtttggcgagaagtcttgaaattgtattttgtgagtttgatttggaatttgcatgagcagccaatgatatgctttaaacagatttgagttgtggtgtttattcattcacatgaatattttcctgcagcttgagattgagagaaattaattttagttgaaggtgttagtttataaaagaaagagtggtggtaaggagaagtatatctccatgtatttatttaaaacatcacgaacgcttcttccttcaattttggtgccttcaccatcaaagcaacaaaagttccaacgtctctgtttttatcacgcactctcatttcgaaacggtacctgtggatttgagagtttggtacaacgctgtgtaatgttttgtgatatatccttatttttactatttttagctatgatttaggtattagttttagagtctatttgttatttctagagttctttatagtcttgttcaggtctttacatgtttgggattcatttggagataatggagtattttggaggaaaacagagattttatgctgcagaagaaatccaaagactaaaaatcgcataggtatccaacgacactgcccctggcaattcaaatatgcaacttattgaagttttgaagatttctaaattcgactctgaactttctcttatttctaaagaaagcccatcacgttttaggtcatatatatacatagttttaaaggtcattgtttagacctaagttttggggaggttattgtctttctctattgttcttgggagcaaaaccctgtagacactccctttagagaagattcttctaactcttttctcttgatatattcatcattgatttcttattcaaacatgttctgttcttcgatgatcatgcttgaatagttttcttgttaggtttagggtttctcattagggttataaatgatttagtagattgcctcttgctaggttatctgtaggattgttcatctttaattgttcttaatactagttctaaagtagctaagtagaacttgattccagataatcgatatacccgccataggtatcttttatcggaactattatttgatgagcctggttaataggtgtgtaataagaatcggcatctctactaaggtgaacttatctaactcgtttagcatgcatgctttggaatagggtttcacggaacgcccccgggaatcttcgctctaggcatagtgagtttcacggaaccccaccggttattcttagattagagtttgagtttaagaacggtttgataacaacctagctatcactagatctactaaccgtttgtttcctgagaataccctaaccctgacgttttcttattttattttacatccccatcatctgctattgcttgcttttctttcttttattttctttattattttgtttagcttaatttgataaccttagtctattgtgtgatccgagagctttgtggaattagacctttaagtgctaacgacgatctcttatttgagggagtaggcttaaggcaatttgagctatatcattttgtatgaatataacctcatttaggtcgttcatagttgtcaaacctgataaggcaaatgttgttgtattctttgcaatggttgcaatacattgatgtgtctcctgttccaagtttattgttgcaaatgttgcattagatgtagtaccatccatattgtggttgtatgtccacaactgtagcaaagcaagtgaagctaacttcctacattggtaatgttaggtttcttaaagcagtaagaaatggtggttaatgtgatttataaataaagagagaatactttgaatataacatgtggttttcattatgtagaaactggtatatttcattgattgtgactgtctccagttttgttacattagaggaggagcttgcgatagttggcgttttttaccactatctcctaacctggtggtggtagtgacttaggcatgtggaatatagttgtttgaggagattcttatattagaaagagatacataccaagtaaggaactggttggtttcatcgacgtcggtgtcaaagaatagacgtgtggatgatgtgttgctgagagacacaacagctgaagagattatgcagattatattttagaattatagtataggttaatgttacgaagcattgtgggacaatggtaaacaagtgatttatacctccgattgttttcgagttgacagtagtgataaggaggactattggtttgacttcactttggttccactattctctgaatgttgccgcaatgttttcccagagatttatgcgtatggtctgatcgctgtaaattaagagttttttttttttttaataattggaatgaatgtttttgaaaagaagatgataagattcattactctttgagtagtaggtataagaaaactcgatcgcttgatctagggccttcaacatggggggctgtttccattgtggtaagggagtgtaggttgtcaccactaattaggcgtagttatccaatgacatctacaaaacacagaaatagaaggagtagttgtcgtgaaatattatttgaatagcccaggatgtattactagtagcttaccaaagaggtcaatatttgtgtacacaattgaagcaaattcttcgaaaccacgaaatctaatcttttgttcatcaatttgatggtttgccgtaggcacgagtaccatcaacgttttgtcgttgaagaagatgccatgtttgtggtcggacactttgtatattattttccagggggtgatcagaaattttttgagcttgtatatggggttgcgtttaagactctcttggtaacggaatagacggtttgccgaaatgaatacttgcattgtgtttgactgtaggacgaatgattagtataaattcgtgttgggtatgtaaattcagcatattagatatatctgggagtcgattagcagtaattcaagatccatcaatatgttgtcttttttgaaatttcgggattcctagtaatgaattagtcttactaagacttcttcctcacagaaatctccatcaatctcatcgaaaatctggaaggtgaatggttggggagactgtggagctttttgtggtggcattttgtgattgtaatgagaggtctggttttttttgtttctctttgtcctgaggaggctttgttttatagtgagacccaaatcgttgtgaatgaaggttgtggccattgatgcttttttaatgtgaatgtatgggagagtaaagatgaggaagtggagagaattaaagatggcttgtcgggttttttttaggaacctgaagcgataaaacttcagaggatagagacgacgacgagtgttggtgacgaagtaggtttttttttcttaatttttttttgacgaagtagggtttatattgtattattagtagattcttttgggccaacgtttttcaaaagatgtggatttgtatttcttttgggccaaggggttttactagtatttggtccattagagttgctgaggtgtacttttttatgcttattttggcatccgtttaattcggagaaagtagctgctgacgtgtctattagggagagtacttttgagaaggctgatgtggacaccttgagaggcgtcaaggagttccttttattagtagtagatttgttttattcaataaaaaaaattgtattatgaacaaaataataataaaaaactatatttcaagactttattttgatttgaattctttaaagatttttatgtcgaaccagtttttagaaactaccaatttgagactttttttttaagtgacagtcattaaaattttgaaagtaacaacaatttaaaagtcattaatttttaaaaaattaacatcaaatttctagttaaagccatcaaattttgtaatctatcaaccatgtatatggtaagtgcatagtatatcggtttaaaaagtacataaataaaaaattttacgtcattacaatataactaacattaaaacctggaaattaacttgtggaaagcactaaaatttcacgtcatcctgtaaagtacaaaataaatagtttttaaggagaatatatataatgactgagatcaaggctgtctcaataagatatgatggttaaagaaaatataattttttggcctattaaaagaaagttgaaaaaactgcaaagaattgtactgttggagacccaaaatcgtaatactttatgaagaaaaataagaattaaccattctaccactagagtttttagtaaattgatgctcctagtttttaatactaatttgatgcctaaagcccttacttcacggactttaactcctggtcgggccagactgagatcaaatgaagaggactaaaggaagaagaacataaatgaatagagaaaaaatgagaagaaagctgaaatctcatgaacttgtggaaagattctttttagaccactttaattcaatttatttacctattaagaatatcattttttcatatcacctactttactttggctccgactagagaaagtggatttagcagtctaagcggatcaagtagataaagtgaggatcaagcggttttggtggaaagagtgcggatcaagcggttatggcaggtctaaaatgtgtgtgaatggtgaaagaggataaaaaaaacgcatatcaatatgaggtgaatgcatttcacgaaataccattgtccttcagcaaaaactctatggatgttaatatcataaatgtaagaagctatgcatcaatcactatttcctaaaaaattacataaacaacattagtttcatctcttatagtcttcatatattagattcaacaaagataagaagtttcatcttaccatttcatcgcatagaatcatgtagtatcttcttattctttcatgagagagtgaacgtcaaagaacttccacttttttgtttttggagaaatttgagagatttatgagatttctttgtacaaacttcctctatcgtcttttgccatgtttatgcttttctccaattaatagtgtagaagagagctgtacaaggttgaagatagtaatgtatataaagtaaatattggatacatatgtgaaagtgtatatttttgattatttagtgtatatttgttttacatctaaattaaaaattgaaacacgatttctaagatatgcaaatcttgtcaagatttgttttggattctcaataaaaatgtataaagctttatatggttactttcaaaaagaattagtaaaaactaaaaaatatgacataagaaatcatatctgtttgtaaagttgtcaaatatagttcataatttaaaatgcaaaaattttgttgaagaaatatatttttgtttatcatatagatagttgttatattcctccaaatcaatgagtcatacaatctttgattttgttaagatttctataaccgtaatatacataattcaaaaacttcatttaatcatatagttaattttttggcatacttatatagtttgtaagatattatatttatatttataattaatttagtttatatcgtaaacctaaaataaattcttcatttaatcatatagttaattgttatgtttaaaaaactaagacagttaaaccaaaatatgtattttaaaattgagtatatattaataagtaaattaaaaataaaataacatatataaaaataatatatgtcctacttggatttttattgaagtacaaacatgtgtgtttaaaaggtttgggttttatttggtttaagtattggtttaaaatgactacttttatttgggcctacattaattatgaatagattttacaatccaattaaaataagttacgaatcccatatatttagattgttagatatgactatttcacaacataaagctaaaaaaaatgttagttgttatgtaaaagagtctaaaaaaatgaaacctaacatgtattcattaaaaagtgaaattataaggatggatcattcaaacatgataaatagaagatgcatatcataaaaaaaattaaaaaactaaattccaaatagaataacatataaaaaatacaaattagaacttgcatattcaagcaacaaatactaaataacttatataaaaaggaaataatccaaaataatacaaaataaaagaaagacttcatattttccatccgaattagacttcaatttgttaaaatataaattaaagagtttagagatcattcttcttgggcaagtcactacacaaatcttttataatctctccattagtattgttttcattgactttattttctattcccattttatagcaatgcttcttacttgtagaacactggccatttccattcctattttcaatttccttacgttttgatgaaggagtggaagttgatgacaaatcaacttcataaacctcaacaccattagtgagaaaaagcgaaaaccaaatagaattaatagataacgaaattttaataagtataaatgatgaaatacatatttataagacgattgaacttgttcgatcaagagaaaccactgacgaaggattcacataaatatctgagtcttcaagaacgatttcatcaacaatattttcatcatacagtctagttacattgtagtagtcatatctactaaagatgttttcgttctgaagatataagagaaactgaaaccatttaaaaaaattgaagataaaccatggtgaacatttaaactttttcataattaataccttagtagtagcaatcacttccatgatagtttgcctaggatacttagcatcatcatcatcctcaatttttgatgcaaactatcttctatagaacgaatttgttcctcctaatgttattccatcgcttgaaatgttgcataaaaatatttaatgtttatacaattataaatttaacaaaaataattgtggttgctttgattcaattaccttttcataaaagcagccaatgaatccaacgttgtataatcaatgatttaggaaacatcaaatgcattcactcgacaattatattttgacaataatataatagttggaaaatagtatacttcagttgagtttactttgaaaagatagattttcacaaagcaaatcaaagaaacaagataccatcaatagattcttggcatgcttgatcaacaatctttgaaaactttcttaaaagagtacacgccaagcgattatcccttgaaggtttaaaaataaagatgaatagagggtaaataaacatcagccaacttaatgaggaaaaaataagggtaaagtgaatatactcattgtctctgatatggaaatcaatttttttttgttgatttgttgttagcattagatttcatctcgaacaacaacttgaacaatcacatcttgacaaaataataaatatagataagattcaacgacatatttctaaaattaataaataccaaatataaatttaaagaaaaaccttaccgactaagagacttgtgttagcacgactggaaagaatagcatcatacatggcaagggataaaaacaactcatcaaagatgttatcatatggagagacaatggttttaaaaagaaatccaatcttgtacttcaagtcaacaactcaatattgcccacttgttggattcaatcttccattcaccctcgactaaacaatttttaaattgtttatgtgatctctgctaacaacagcatagatcttatcaccctacaaaaaaccttatattgttaacaagttatatgtgaataagattgtgtatataataatataatacagatctatggagattaaaaactatttaaagcttgatcagcgaaaatgatttccaatgattcaccagtttttgtggaggattgtctccaaccatgaagcaatttaacctagatattccatgcatttttgtaagcctcgagagatttcaaggggggaaatggaagaagattagcaaacatcatttttttttcttttttttatttgttttgtatgaggaagaatatgcaaaattggtgaatgaaacatgcaaatggggaagacggtatttataagagttgaagggctaggtccaaaatattctatttggattatgtcttggaaaaaaagtttgtgattaatctaaatcaaaaaaatatagggaaatattaaggtgattgtcttaaaattagtttgggaaatatagaatatgttaggaaacggtttaatgattcgagagatttttgaacaataatattgatttagatttttaaaatatatatttgattacttatagttgggtaaaaaatttaaatttacttgcattaaagtaagataattcaaaaacgattgggaacattccttttccagggctgagattataagttatgacccgttcattatcattcgggtaaaaagatccgcacatttgttaatggattaaaattaaatcaaaggttcataataaagaattttgatggctaagattagaacttactattcgactgcaacaaaacgggttaaaatagatccacgtccattaaaacgattttttttatgtcataaattctttaacagaatgacattctttgtaaatactaatcaactttcagggtagctccataaacatactgctcaaataatagtatagatgagctgaataaactgaattagatgaataagataaaaattatgctaattggtgacaatctagctaaatagttgaatgtagagaaatattatttaaaataaaatctaatgttgctattgagaactacgtcgacttgccaccatatttgctcagcaatttgacaacaggcgatattcatataattttcatcttgtgtttcttcttccatcccaacactttgatcatcattgtgtttataagtagagaggaaacttacctttcactcatgactataattatttttaaaacaagaaaaggagtttagctcataatattttctatgaagataaatcttgatgggcagagtatatttataggaactgatattagttgttggttttaataaaataaaaatatgaattgttcaaaacagttaaatagagaaatgatttgtaggaactactattagatgttggtgtctgtacttgaatatcttctatttgattacaaagtatccaaagattaaactaaattagtttagtatttaaatttttgagattctctaaacaaacaataaatttatataaaataatttaaataaatgataaaataaaataagtaagttttcattttgttcaatttgttcctctcctaatttgaggatgaacaatttccaactaaaaagtgtaattatccaactttaaaattggtttgaattttgttttaaggcaaattgtgactttttggaggaacaaagttgaatcaaggtttcaactctttcaacttagccgattaaggcatccatttctagcttatgtttgttgtaatttttcaatatctataatcttattactctatatatataatatttatatatatatataatatgtatatatatatatattgttttgattaaatagaattatgcatcataaataatctattgattattcttcttttattatctaaaggacataaaaatattgatgttataaaagagtgaagtatagagaagggactaataattgaagaagactttccgttgattttctttgcctaaattgtgtttaatttttacaattgagtgaaaatgcatatgtatactacaaaatatagacaacattactgtaaataacaaatgacaatgggctccatatcatgttaattgtaaataacagccgctaccgtaataattctcaggatcgttctgagaaggttgggggacagctggggaagtgtaattccgaattggaccagagcttcgggaagcgggaaggttaatctggcataatcgaattgtagagtacacacggaccagctatatcgttcaggtgagaacagaggtcgacagacgagcgaggagggttctagtcgtcaaaaggtgagttgtgcctttccgccgaagagtcgaagcttcataatggggatgaaggattcataattgcagaaaaagtagaaaatagattcttttcgattatttgtcctaaagaggaagagtaagtataagaagtgaaagagaagaaaggagtatataccttacacgaacttgtggctgagaacgaaacggccacgagagtcgttggaaaagtggaaagtcaaacaatatttaaggagggggggatgggtaattgttggtgttggataccctacggaagatgcaataagtcaacaagagtgaaagtcaaacaatatttgagtgtgcgaatccgacatgcacaaccgccacagaacatcagccccaaaatcagtcttctcttaacacactagtaagaactcaggttcctcgcccagatttggatttgagtaccaatgacaataatctctgtacttgatcaatcctttcagtttttcatttgtttactgtgaaactgaatgtttagtatctttttttggattgtaaaacttaaaaccttaaacttatgtatcggaatgtattttggattgatttaggatttgtgttggaatttgtgaattgtttgttgtatttaattgtatttagattcagaataaacgaaacattgttcagtggcgaccattgaacaaaaagagattgccactattatttcaaaacaaaattagtggctaagtttttgcaaagatggtggctaaatcagttccaaatattcaccaatagtggttacgattacagccaccactaattatggtgacaaaatagtgccattttgctatgataatagttagtaactcaatagctaattgctacaaaaaaaaatagtacccaagcagtagctacattagataccatcattttgtttctgattcagcagttaactactacataaccaatggttgccaattggtcaccatatagccactagtaagtgaagtagcaacgtagtagctaatcagccacacatggtgattacggcgactgaatttcatttagcttatttccataagcaaccgaataaaattagtgcagtaacagtggcaaatttaaatatagcgaccgatttgatatattaaagactggaaatgtagtgttctacgcaatctcaggctcgtccaatcacaaagacgaaaccaattttaggctcatcaaatcaattggcatgaaatcaatatcaggctcatccaagcatttggcataaaaccataaaaccaatctcaggtttgtcaaataatccatgtacgaaacaaatcacaggttcgccgatcatgagacatgaaatgcaatcccaagctcgtgccgccaacacgtaaactcaaattatatcatcatgttatatataaagtattcctatcatacatcatatcttccttctatgtcacacaatttgaatcaatagacatacatcaagggacaaagtggctaagcctatacacgcaattcaagaagaaaatacttataaagtaaccacaatgtttccgcaaatcccgcctcacttttgccttaatttagttagaaatagtgactagcaagttgcaaatgcgactagaaacagcgacaatgttctggaaacttgcagctaaagaaataaattcaaacaatatattagggtttctttttttaacaagcacaattgtttcttgaacaacaagcaaacgtcgtgattgctagggtgtaccttttccggcaactttgaagacttaggtcgctttcctcacacctcctctgtcaataacaattgtaggtctcgcctagtttgctctaacttgaatctgataattttgttttaaaaagttaggttttctagaaatcaaaacaagtgatttttcatcaacttccaaaacaatttctgaatgcaatatacctccttttaacaaaacataaactgctatggattccttgaagcgagatgtatcgagagacgtcaaaatattgatctaagtctttctgtttcgacgggaaatctgtccagtaaatccttacttggcacaatttctcttcttcttcttcacaataaaaacttttatttaatccaaagatccaacagatcaaaacaaggagttgtagaagaagaagaagaaataattaggtcgggtttccttatccaaaagaactagtacaatgggtctcgattctggtgggtgatgtgaacgacggtgactacgtgaagctccgctccaatggtgataatgttgcctttactttcaccacaatttgcctttgtaattggactagaattttatcttggcggcttaaactagattttctaaagaagaaggatatgttgacacacatacacatgtatatggccacatacaaaaccttgtcgttttatgattttgctttacttgggttttatgggcttcaacttaattacgattgaggatgttacaatttttcaagcttatggaattcgaggacgaattcggcaatgaattatattttcatttatatatgatttgaactaacataacactaaaaataattcagttgacctttaaaaactcaaatatcaagtagtgtagcaataactaaatgaagcataaatttgaaaatccaaatacaataagaaacaaaaatccaaatataaatcaagtctcgaaacaaattatttgtctcttcccaaagccgatcgttttggaggtgatgacaattgttcctcagtttggttgagttgttttgtcttgcaatagcgtaatgtctgggccgcccacacctatggaaatgataaattcctcttggggaattctctcttttatgccccaattagccacatttcatgcaactgcctgaggttatctaacaaacttcgcggtgtagttttccacaagtatcacacacatgagctttctctcgcatttggttatccaagtcctcttgtgagaatccatcccctttgcagcttcaaccgtctctttttctagcccaatttcttaattagcagctatttccactagctcaatcatgtttgggtagtagttcctctcacaaaggattttgaagtttaatcctcatatcccttataaacatgcgaacaagctcctcctcatccaagaatcggcttgaaaacctgctcaattgatcgaactccaccacatattcccttatagtccatattttcctggcggagttctcagaactctctcttcatctggtacattgtgatgtagacatcaaccttacttccataactgctgaactacattatgtaccacatactgtactacatcctgtaccagaagccccagaaggtcgcataacacgttcaaaggctaaaaaattgaagaaaaggtttaactttgttgtgctctatattatgagctccttagagtttgagggagtaaactggtcagtagcacccattaccggatatgaactaatagctgaagatgagcttgtcaagcattcaccaaaatgagtcttgaacgaactactcccctaggtatgaaatctcatttgacaggttcaagagcccttaaaaaccaagtgaagactttggagctgcaagagacaaacgattcaagcgtcacatctgaaatcaagagagtcaagatcaagaccaacacatgaaggacgtggaagatctcgaagaaactaattaaacttctcaagaggaactccagaaagaaccctacttcatggaactagccagcaaacaagcagaagacgtgatccagaagtacctcaacaagtactataagaagtgacttactcgacatctattgggccaaaaacgcatccagataaggtttattcaattaatactatctttccaagttcacacagcccaaaaaacggctagactcatcatcaaacgtgctcctcaagagaagttaagtagtttccttatatagtttattgtctttctaaaatcaatggcttttgtgctttgattttttttttttccttgttacatttttgcatttcttttttgaccctagggctagctgaaggagtcttataaagtctgcatggagaaagttgtacaatgtttcaaccttaatggtcaataaagaagccgcattttcttatgtttttctctttaaggtttcttgagagaataagcttgctctttgtcttgtgtttgtgattcaccaaggttaagtttgtttactatatcagacaccaatcacatatttgtggtgtacttcaatccgccagcgttcccctctatttgatcccacacgagagaagggatcgccatcgtgtcagatctacatcatggaccatttgtccttcacaggagagaagcgatcgccactttgtgaagccaccatctctatctaatacaaggctcaccaccatgtcatgtatcatctggtatcagagcgcagttacgctttccttgccaggtttcattgttcccttattttctcatctgctttactttttgaataagtttttgtatcagttttcttgagaatatccctaagcctaacgtcttaattacttgcatttacaaacttaaaatttgcagtttgctaatctgctttcttttattttcattacttattgatttagcttaatttcgatactataaccttttgtgtgaacaagagagcttcgtggaaatcaatccctaaataattacaattggcctcttatttgagatagtagtttagggtaatttaatcatatctcaaattggcaccgttgggaatttcatgggaatcaccatttggtttagtttagagattttgtttaaatttttcttttccttttgatactaacgcgtttcttgtttttcttctcttatgtgcttcaggtgtatctgatatagctcaaattatccttaagcttactccctcaaataagagatcgtcattagcacttaagtgttgaatttcactaagctctcgttgttcacacaataaataagtgataattaatattaagctagacaaagtggatgaaagtaaagacaagaaaatagtaaatcaagttctaaattcaggagattaatgcttcaggtctagggatagtcttagggaatagctaaattgtagatctagctatgactatgattgttatcgacccgttctcaaacacaaaccactattatagaataacccaacgttggcttggcattcctccctatatctaagctaaggattctctacgatgggttggaaaatctctaatcctaaatatgcatgctaaacgagtttgataacttcacctaagtaaataagtcaattctaattacacacctaaaagtttttaaggggttgtgttatgatggggcactttacaagtttgtaactccatttagagcactttggagggagtaggcactttttggaggtttttcactatttgataaaaatcaatactaatttacccttctatcatgtgagcaattaacccaactatgactaacttgtttattctcagccattggatatgtatgaaagagaatagatctaatggctttggatgtatctctcttctcactttattttctctctctttcttttataattttatttttctttagtttgtcacattctttattttattaaatatcttttaaccatttttgtaatatatataataataacattttttccttcattttgaatcccatattactatatttattcgtattattatttattgtatcatcaacccattaacagattcagaaaacaaaaaatccatatgatctaatccatatggacaacaatgaaatatataatctttaatgagaaccatgtaactataaactctaaaatcattataaacaatcatagttccttaacactaaatcctaaaccctaaacattagatactaaactctaaacattaaaccttaactcctatatttaaaccctaaaccctaaattgtaacccatagacactaagcccttaaccatatacatataccctataccatataccataaatcctaaacactaaaccctaaaccctaaacctaaaaccttaacccaaaaccctaaaccctaaacctaaaaccttaacccaaaaccctattacattaccttaaacatagtcctaaacctagactctaagccatataccataaacactataccctaaatactatgcactaaaccctaaccccaaaaccctataacattaccctaaaccctaaatcctaatctctaaaccctaaaccactaattttctaaactataaactctaacgctaaactctaaaatccagacaataataattataccctaaaccctaaaccttaaaccctaaaatataattcctaaacagtatttccctaaaccctaaatccaaattaataaataaactattaatacttatcattaaaccaattacacataattagctttaggttatccatcataacaaagccacgtggtttgacaacccgaaaaatacttatatattagggcatatattgttcaactatacatatcaacgtggtcatatattttgggttggaaaaatctagagattttgtatactggtccagccttgatagtctctacaatccttttttttggaaatgtgtaaaggcaaaaaattcttatgtattgtatggagaaatccttataacctaaaccctaaaccctaaaccctaaaccctaaaccttaaaccctaaacccttaaaccctaaacccctaaaccctaaaccataaagaataaacccttaacaatatacatataccatatcacgtaccctaaaccctaaatcctaaattctaagctcttaactttaaaccttcttgttgttgtccatcaatattaaacataaatctcctaaatataaacaaatttaaatagaaaatccatatgatctaatccatatggacaacaatggaatatataatctcaaacgagaaacatgtaaccataaaccctaaatcattgtagaaaaccatgattcttcaacccaaaaccctaaatcatctaaactaaacgataaatccaaaacaataaagcctaaatcctaaaatgtaaaccctagatactaaatcctaaaccctagacattaaaccctagcccttgactttaaagcctaaaccctaaatcctaagttttatatgtacataatctataaccatcacttctggtccatgataatctaaagcattcttcttaatgtgaaagcgtaaaatattattgagatcgatgtgttcataaacaatcatacaatatacactcgtatttattatttgttaatatgtaatcgtggataaataaatattaacattttcgtaaataaacttttgtggatatgaccaacagaacttgtttcaccatatttatcaacatctttttcataacttaacacctgttttatggatagtattatcaaaacgcaatcactttgaattatcgaccatcaacacacatccaccaaactctgaccatgtggtcatttcaatcattttgaactatcgaccatcgatgcacatccaccaaactctgaccacgtggtttacatacaaataagaatgacaaaatagtaatttgtatacatatcatcctttccttgaaaccctagccgcctatcactctgctatcatcttcttcctccgactcattaacctattcaaccaccatgtcttctttgattcatcaaaaccataaccattattaccaccatcatcatcatccctcttccacctctcacatttcacctctccatcaactatcacaaaaacaaattaaagtctttaccttattcatcaaaattaggtcaaattaaacaaagaaaagtaaaaaaaaaattgaaaatatttgattgtatcaccggatcttaacaattttgactaatcaagttgaatcaaacaaattggtttataaaatctataaaatttaatttctatttgaatcaaacaagttgaaactttgctcaaaaatttgagacatgtaattgagatttcagagagaggaagaagaaagaaggaaaatagatttgagagagatgtcacgtcatttgggagagaggaagaagaaagaaggaaaagagaaggaagaaggaagaaagaaaagagtaggaagaaaaatattatttaattcctcaactacaccaaagtaactatggttaacttacttttgagtttatggtaaaaaaacttgaaaaagtgcctacttctatgaaagtgctacattgcctaattagaactcaaaaagtgtctttctgcctaatattctttaaaaataaatatgttactaaaaatatgcatggtctgttttacaaataagacaaacttctgggacttgttaaagacttgatgaaacgtgggaattactttttcaaataagggtgtcgattgacatagatgtgatgtcgatcgacaccatcgtgtgagtaacgtttctactagtcttctttcctggaaagcttccaaagttcctgattatgctccatagctctcaaaagaagttatgtacctataatggctgcaaaacatacgaaaaggactagaaagactcaaaaaattatcctaatactatgttaaaaatcagtaaaaaccatgatatatcaactcccacagacttagcttatgcttgccctcaagcaaaacataaatccgaacatgtggaagaagtttgaaaatgtaaaaactcccgatctctctagcttatcagcttgatcattcaaaccatatccacgtacttaacagttctattgaagtcctaaccaccatgtagttatccgcaggcttacacaacatcctaaatttcataccaaatttcacaactatatccattaggctttcatcgcagggtctcatcaatcaagttagaactcaagaacctactagactcattcatgtactataccatgataatttaaccattaaaacattttttttgcattttttctcttcccaaacttattcttttcagagattagacaaggagtactcgctcatcggataatgggatcaaaggaaatattcctagccctttacactacagaaaatcatcttcattactctctttttctgtaatttgttatatgggaagagtaatacttattctttttcacattggtcttattatcaggtatgaacaaggagtcaaatcctatgaacaattaacatttttgatgaggtaaaaggaagagcagtgacattagctccagcctttatggattatgttggaaagatggatgtccttaattctgttggcttgccctctggattttccattagtcgggttgaatcgaatatgcagtacttaatcaatacatgcaataaaatcgagagaaagatcataatttcagacaaaattttgattcaataaaacgacactctattaaaaataacgcaactgactcttaagaaaagataagataaagttagcaatagactccctagacttagataacattgtccgaagagttattaagctacagaaatcaaaagaaaaatttattaagagttaaaaagttagagaaacaaagttgccacattaaccattaagcagtgtcgatcgataccaagttggtgtcaatcgacactctagtcgttactgtgttgctttgcgatttcagctcagcattgctgagcttatcttagtgttttaacatggatcctttagttgaaactgttaaatcacgataacacacatcaataaggttcaacaaagcataagaaaataagtgcaacaagtttcgaagcaaataacaaactgtctcaaagaaacaaaaaatgtataaagagaaagaaaaactaagtgaaaacaagaagtaaagatagggagaatggctaatcctcatgctcaaagcctgaagtgggtattggagagcaacgacaacaatgagtaggggcaatacaaccagaacaagaaagtgtagctatcgcaatccaaacgctcttaaaactgtcaactacatgctgctgaaaggctgatggctccatcggaatgggtggatgagtaggaagctcgaaagtcaaggctgaagaagatgacccaaaacaaagacccccaacagggtcaatgaactcatcgactgtctgtgttggtgcggatcccatggttgtgcctctctatcgcctagtgtgtggtgcagcgtgtagccatctcccgatcaaggtggaaaccaagctcctcaagctgtccttgtaatctctgtaagcttagtacagggcaactgattcatatggttccgaacaccacaaatgaagaagataagagctccttcctgagcatttcgcaccctgtcatccgcataataaccctaacagatgccataaattgccacactagctctggatacaaatcatactgcctagtacaaatcgttctcaagcctatatcatctagcaatcctaaacagacttctccatccgcatacaatgcattaaatccgaatccgcaaaccgagtaggttgggtatccacattcaaccaagcattgtagaacaatgtatcatattcatctcaatcccgagaaaaagggtgatgaacatagtcactttttgtgaattcgctcattctccatttttgggcaagggaaacgtgaaaacgaccgtgaaaagctacaggaggttgggtctgcggtggtggtgagtcgccggcggtagtggtgcgccactatggctgggaggaggaagaagaacctgcactgccacctttcttttgtcgctttttctcgccaaccattcttcagatcaataaaattaatactgggaatgaatagagagcaaaattctaatgaatttagactttgaaatcaaagataacagtgaagaaacgagaaatctagacagaaaaaacaaaaattgtcgatgagaaaataaagaagaagaaattgaagcttaagggttttaacgcaacatacctcgaaattaacggtgtcgatcgacactagcttagtgtcgattgataccattgagcttgctcgacaccaaaactcgtaattaagccttttttttctttttcttttgaataatcaaagatagaaaataattaagtgaaataaaaaaactatatataacttaccagtgggttgcctctcattaagcgcttgtttagagtcaatagcttaactttggagcagttcaatcaataggtggatcctgaagatccaatggtctcgccatagaaatttcggtttcaaccaaataatgcttgactctttgtccatttactgaaaatttattgccatttttcccaataagaacgatagttctatatggttgaactgaacgaatctagggacctgaccaacgagaagacaacttgccatgaaatatatttagtcaagaattataaagaagtacctggtcattaggtcgagggatcgagagatgatcttcctgtcattataggccttggtgcatctgcaacaaggtagttaactacgtcagcataccatggataatcgttttcaactactgtggcagcgcagttctttgtgaaaatccagtcgttcgtctgattagtcaggtgtcgatcgaccctttgaatggtatcggtcgacaccctcgagcatggtcgaatctcattctcaactgtaacggaggtgtcgattgacactttgaatgttttttatctatcgacaatgcagctcgattcatcaactcaacaattttgtagtcgtctttcttagttgtatcaatcatgtatatattttcttcaagcaagaagtcattgatgggaacatcatcttcaatcctaattcgtgacaaatgatctgcaacaccattctcaactcttttcttatctcgcacctcgatgccaaattcctgaagaagcaaaatccatcttagtagccttggctgagcattcttcttttgcatcaaataattcatggctacatgatttgtatgcaaaatcaccttagatccaacaagataagatctgaatttttcaaaagcgataacaacagctaacagctccttctctgttgttgcataatttctctgcgcatcatcaagtgtcttactagcaaaatagatagcatgaagtttcttatcctttctctgccctagaactgtcgcaactgcaaagtcactagcatcacacattactttaaaaggtattgttgaactattggtgcgcttatcaaggcttgttatatctgacggtatgcatcatgacactctactgtaaactcaaacttgacatccttgtagagcaaagctgtcaacggtctggcgatttttctgaaatccttgataaatctcctttagaaaccagcatgaccaaggaaatttctcatggctttgacgttatcaggtggctgaaggcttgtcataaccttaatcttagctctgtcaacctctatgccatgtgttgaaatcctgtgaccaagaactattccatcttgcaccatgaagtgacatttctcccaattcaaaactagatgtttctcttcacatcttgccaacactttgtagagattctcttaacaaccctcaaacaatgatccataaactgaaaaattgtccataaagaccaccatgaagtcctcaataatgtctgtaaagatagacatcatacctctctaaaaaggttgtagaagcattgcaacgaccgaaaggcatcctgcgataagtgaatgtaccatatgggcaagtgaatgtggtcttctcttggtaatcgggatgaatggggatttagaagaaacccgaatatccatcaaggaaacagtagtccttgtgattcgctatcctttccagcatctgatcaataaatggtagaaggaaaatgatctttcctggtagaagcattcagcttccggtaatcgatacacatacgatggcctttaatcgtccttgtaggaatcaattcatccttgtcgttcttgaccactgtaacacctcctttcttaggaactacatcgattggactgaccgaactgcaatttgaaataggatagatgatccgtgcttcgaacagcttcatgatctctttcttaacaacatctttcaaattcagatttagtcttctctaatgctcaattgaagacttagtctcatcctcgagatagattctatgcatacctgtaatatcatcaagagagttgccaagagcattgcgatatatgcgcagcttgcttagcaatagggtgagttctgcgtgacttaaagaggcattaacaaaaacagggtaagaagattttttaccaagaaattcgtacgttagccctgaaagaagtggctttagctcaatcttaggggctttatctagacccctatcggcgttagaaatcagttttggggtcgtagatggaagatcttcttggactattagttgcatcacatgttgggtctcatctagcagctttgttgtccaattctgcgatatcctctattgataataccagtctctatctctgaaatactttttgaagctattggtgcgaaagaatctatcagaaacgttttaccttctataatcggcttcttaaccaacttgttcatatcaaattgcacagtaagatcaccaacattcagccatattcttcccttgtgaatgtctatgatagctttagctgtgtgcaagaaaggtctaccaaggattaaaggatccttaagttttctttcataagataaaatcacataatatgtgggaatcatgctattctcaatcatcacaagaacatcatataggacaccatctagaatacgggttgaacaatgtgctaatacaagagtgatattagtaggcccaagattgaaatacccaatatgtgttgctacagaacgaggcataaggtttacactagaaccaagatcgcatagagctcttgggaaggtagctggtaccctaaaccctaaaccctaaactcaatagttgctccgagtaaaaaggtaccaagatcttgtagctttcttggagtccggttctgagatcatcataacgctgcattcattcttcagattcttggtgaccaatgtcttgatatatttttgtatcgtaagagagattagaatagcttccacaaaaggcatttcaaaagtcagtttgtcaatcatagccttgcatctgacatcatctaaagcttttcttgccttcttaggatccttagaaaaaggaatacttcgatttgctgattttgcttcagctgtagttgggattttgtctgaatgaactgggtgttgattgacatgggtaagtgtcgatcgacattatcgggcattggttcctcctccttcatgaaattttcgattcagctcgacacaggaataacagcttcttcaagattaattggtgttggtcgacaccctgttgtatcgattgacactgaaggtttttctgcaactggagaaagcttagctcttgatgaatgttctctctaaagaactgggttgactagctttccactacatagcgtaactacattgacggactctgttgtagaggaagactcttggagtttcctgatgtctgtttgcatttgagataaaccgatttttagctatctgagtagtccctctagcatggctttagttttattcttagtgacatggaacaaatttaccctaagcttaccgtcttaaataaagagttcatggttagtacttagtgttgaatttcaaaaagctcttttgttcacacaatatgcctgtcgaaatcaagctagatagataataagaaagtaagaaagaagataaagcaaagcaaatagcagattatgggttgtaagataagataataaaaactttaggtttagggtattcttaggaaacaaatgattagtagatctagtaaaagctaggatgttatcgaacctttcttaaactcaaatcactgttagatggtaacaggtgattcgtcatattactcactatgtctaaggctaaagtttcccagcgttggctttgcaaatccccaatttaagacatgcatgctaaacgagtttgataagttcacctaagtagataggccgattcttattacacacctataaacctggctcatcaaaaagtatttctggtaacaaataggcatacctattatttaagatc

SEQ ID NO: 488 - DNA, 90627 bp, Arabidopsis thaliana
aagcttatctacattctttcccaaaattacatcaatattttcaaattgttggtgaataacagttcctactggtttaattggagcattctttctttcaacacatccatctaaatgctgcttatctttccgaaaattaagattttgaggcaggaaccgacgatgtcccatgtagcagtatttttttccatagcgtaagcaaaatccaaaaactctttgactccatttctatattcttgagataaactgtgttttgttatccaagagttgtctattttacaatcactataaaaataaagtaaattaattatcagatatgacatattaaatttctcaccttataacatataaaagttcgttcaaagaataaaaaggttaaaccaataattgcaactaagttcaagccataaaaaagaacaatgtgatgatttctatataaatgaaaatcgaacacaataaacatataaaaaaaattgatgactcaattattactttctaagaatccagaaacgattttagtatcacccaattatcgtttttaagcagccaatgttcataagtaaaagaaaaatcgagaaacaatttcagtcatcactcaagcaagaagcaagacaatcaaaacattaacatttggtagattttaacaaaaaaaggatcaatttgagaatcaaagaatgataccttgattttttctgaaatttgagaatctcgtatgtccttcaacgaaactgatcataaacttattcatgatcctttatatccttcaacaaaattcagaataattgttagaatcaacatatttctaacatcgattgaacaccaaacaaatcctaggaacgattgagctataatcgtaggaatgagatctaacctaagaacgaaacaaacgcatctacatctaggaatgattatcctacagatcctaaaatgagctataaccctaaaatttagaatttggactttagaagcaaagaaagtttagaatttaaagttatataattaagtcagttattcactgactataaatctcctctagtttcagaatttaaagtcattttgtaaaatgatgttaataaaatgactataaatcccttgttttttgtagtgccggaagcacaaatcataattaataaaaactattatatatatatatatatatatatatatatttatgacgttaaagtaaattttgcacctttacgatatttcagatttggaatcgaaaagttttgaaagcataatttaatttacttatctaattaacattgtcacccaaatttaaactccaaaataataaattaactaaaaagagaataataaagtttaatgttactaatttacaagttttactacaaaaattcagttaagatacatgtatattttacaaaacaaatatgaattgaattttataaaaattaaactaattaaaaatagaaaaataaaataaaagtgaaagcatctagttttatttatgaaataaaaaaatgcatcaaatagtaaagaaaaacaaaaaagaagaggctaaagttgctaaacaaaggcatttaaccaaaaaaagagtgaaataatatgttcacgtagattatttctgttgttgtattggatattaaaaaaactcaatattcttaaacattctgataagtagagcttgcaacatagtttgggttttcttagtatgaatcaaaaaatctttcaaatgactatggagtcctcatcctctaatatatttggctttaccaaaaagagatgcacaaagtttcttcataagttttgcaaactccttccttagtccaccaccctctttcccccagcaggagcctcaagtgaagtatgtttgacaattaactttggtttaacctattgcagcagctggctagtcatgaggcttcgttgttgggaaaaagaaaacctcatgcaacaaaattcagaacatgagtaagacaacatacatactacttcattggatttctctagactggcttcagggaaaaaaaaaagtgggaccttaatgttctgtgagtcggtaagtaacataagaggcctgtctattcccattccccaaccaccagtaggaggcaatccatattctagcgccatgcaaaacgtctcatccatagccatagcttcatcatctccagattgtcgatcttgaaaccaatcatcaaggttttaaaatgataatacatacgcacatatatatatagagagagattaaggattcaaatatgttgataaggtcagaattctcttatcaagtagagtaacaaaaagtgatgagaaaacagaagaataaggtgagaaacagaagaatcagggaagaagaagggagaagaagatgaagataaacattgttatgatctatttcgataacgtttccacaatgttaaataagacaactaaagaaaataacatgcttaaactatgggtcatatacaaagcccactaggcccaattcatgatctattaatactcctccattgaaagccaccatgtcctcatggtggaaggaattgaaagtgaaactctgggaccttgatcattgccttgttcgccttagtctcgtatttttatcttagctccatgatcgattgtacctgtacaaccatattggttagagcagctctcattaccacccttaggagtgaccccaaactgcttccaactgttctcttcagctggtccttccctggcagtcttgttccttgacgatgagaaccactttgagatgaacaaacccaaaatcttgcaacccgttctgcacttttgaagacattccaacgtcaagccaaaactttccaacttcattccaacgtcattctccgttctacacttttgaagacattccaacgtcaagccaaaactttccttcacttgtcattaaccttaagcttaggtgattgcaattctctcctttgtatttgtcaacaagaataacagtttcgttagtttcttttacgagctattgtctcaacattttaccacctaacaattctggtggccgtggagattgacccacttccccggtgaattccagcctcaatagcaacccctcttgcttctctcccactctattttatttcccctgcgtcaccttggttactctttcccacagaaccttactcaccccttttaaagctaccttgtccacaaagtaatattcagcagtcatttcacaatcaccatcgtgctcaacttacaactcctcttgctcatttccactcctcattttcactcttatagtacttagtttcagattctcctttgtgtatggatgcagaacatcattttcctcgccaatggtaacccacttattaccatggttaaaagacataatgttcttttcccaattgatacttgtccctcctaacatggaaagccattttaacccaatatcactgatgcttccgtcttgttctcgttaaccaaaaggaaatccttgaatcaacaaacctattcccatgcatttttctttgctctttatgtgcaatccatgacccaaaagaactgaaactagatttgtctccttccctggcagcttaaagtgaattgctaaatccttaggcatgaagttgtttgtggctccggagtcgatacgcacagacacatgatgtcccgagatagaaccaaagaatttcagctccttgtttttcattaatccgcaagtactaaagacctcttgattaccttgcaccatggtcatacacattagctcttcaataccagccctatagcctgaaactggtgctcttgtatctcctcctgtcccattatcattttcactagcttcctcaagccactgtgccaaattcatcatgcctacaattccattagatttaaatcgcctaactgcatcttgtaaagtaggctttaaaccttgtatgaatatctcctctaagtgttgtcctggtaaagtaactaagcctagacaaatagcttcaaatctttctctgtattcacgcactgatccttcatgttgtattcccgaataatgaggttgatgatttacattcattgttgtctttgtctctcgggccatcatacacttaaattccttccagcttgtaggtgaattctttttcgagagatgctttatccattaaccagtctctccatccaagtttgaataaacaatttgtaacctctcatgctccggaatgttattctcaccataataactctcaaagttgcttagacatcttcttaggttttcatctgagggccttgatactctatcttccacctgttcctcttcaccatgtgaatcgttcactaatggagtaagtattttccttcctagcaactgtttggatcgcaatctagaatcaagcaaaaaagttcgagtctgttttccacgtctcttcctcgtacctttgacgttttcagttccaagtgggatcacgtgatgtctccttagtgttctcttttttatgaccttgtgatggctttgtataatagggatacgacctttgttgcgagattgattgatgatttttaacacaggagccaaaggatcgaaaggttcttctagtggtaaaacgcccaacaagtgttcgacagtattctcatgagaatttccttgattttcaccttgtataacaggtatcgttccttcctggcgagaatgatttgtcattggaagctcagaaattgtgggttctgaaatccacactagagatttgtaattgagattatgagaaaggagggctagatgttcacagaaaccttgagagttatattgctaagaacgaatggaatttttgtattgataatgacaaagcttttacaatgtgaaaggagattacaagtgtaaaagtatgtgtgtgaatgtaagctgaattgaatgtcccttccaagtcgtccttgcttctttatatgggtctacgcacgtggtagctccgttcgggatctgcggagatcctcctgaatattgggcaggtcagttccgagatatcaggtccgctccgcgaatatctcctcatcagttcctaggttgttattcgcttatctcccttcattaggtgaccgggcttatctggcccaaatacccattcgcgtatgtgggctcatcagctgcgtaggtcctctacttggtgggcttggtgggcttttgtgggctagcttggtattttcgcaggtggattcctggaggggaatccagctccaacatttgccccccagcccattgagtgagtaggcaaactcgatgagcagacatataggtcatgtaagattgcgaaaatattcttgatgagatgataaatgctataagatcagtcggttttgaggataaactcaacaattttgatttaatttcagattccttaacccaaagatttcgaggagatacgcgagataagtcgctgctgatgtggacggccgagatggagcgtctcattcagcgaaccgcatctgacggtccagattaggcgcagagaagagatctctacaatctcaaaaatcgtggtgatgatggctttaaataacttcccacctctccacttgacgtcacgttaactcacacgactctcaaggtaacttctctcctcctttattatttactgcgtttagttttgtagagatagaaaaatctcgtccttttttttttgctatctccttcatttctctgctgctccctctctctcgatctgccttctttgctcttttctttcatctctctcgtccctctctatcgaaacccaaagatgagcgacttcgaagattcccagaataaaagcaaccacaattatggcgacgatgagagttcgtccgagacgaggtcggcggcatcaccgcagcgagtacaaagacgcgtcataaccctaggcggaataggtccaattcgtccgccgtctatcagagccgacaaaccgaaaaagaaaaaggctgccaagcaaggaggaggcacacggatgacgaacagcgacctggtcgacctccggaggagatgccaggttccggtaggggtaactatgatactcccaaggccgccactgcatcgtgagaacgtgccggtcgggtggtgctgcgcttatgccaatttctttgagaaatgtggcctttttttcccgtttccggtgtgtatcctcgagatgctctactgtctcggcctcgcctttccccagatatgcccgaactttgtccgccatgtattggcgttattcacccggctcgggaagtagatagagaattcaactgccatgacctgcttcagctctgccaggtcaagaccaatgctaggagcgaccaggggacgtactacatcagtgctcgtcccggatctctgatcctaggcggtttaaaggcttatcgagacaccaattggcgatccaagtacttcttattcagagtagatcgtcattcaatcggcagttttgatcccgcgaggataacgaggacctagtccaccaacctgggtcagatggagacctgagcctcttggttttttgttgtttgtgtcgagtccttaactgcttttgctgaacgttagtactgatatcaatgttattttccctttgatggtttgcagcaaagaccaaggaagttactctctcagagactcgagctgttaacccttctctgacgtggtcagactaactgggccacttttagcagagatcgcatcgtagctgctcatgccgtagcttcagtagttcccttagctccagcagttcccgcaatcgtccttccagcagcacagctagatccgatcgaagaggtcccgtagatttaaccgatccccgaggctgatctgcctataggtacgagttccgtttttttctttttttttttagacaatgtacgggttactgaggcagctgcgtaactcgagctgctaactaacacgtatcgtgctttgtctgttcagttcctcctgactccagctccacttcagaactcccgctcatcagaagaatgaggcgtccaagtcttcgtgttcaacgagccaacgccggggctcctgctcgtggtgatgatctatcgaccgcgatgactgcggctcgacacactctagctgtctccagcgcatctgcctcagcatctcatccctcaattcctgagatcaataccggggcctccgctgtagcaggtcgttctgattgtgcaccgtcctctccgaagagagcttggacccagccggaggtgcatccggcggctgagttggtcgtgagtgactagggggtcgcctctcccagagaggagaggatagaatctgcggctgctatcccggacgcagctgcgtccgcggataggcggtcctcgggcaggtcccatggcggaggacgaggctccagaggtgggggcaggtcttcaaaccggactcagaaagtgaggcagacgtccaactctggtggaggttccgcgggaagcgggcctttccactggtctaacactcacgaccgtgatcatccgatcgttgacgacgaggctgggttggcgaacctgcttcgccacatcaaagggaggaactgccaggttcctggagtgaagaacatggccaaggcggcatcttatgctgacatgatggcgaaggagggccaggtaataaccgataactgcctcctcctgattccattcttatgctagttataactttctgttttgcctttggtaggcgatagctgccacgaacaagctggttgctctctatgagcagcgtttgagtcaagtcccctcggcgagcgagcttgaagaaggaaagaccctcatccgggagctgacgtcgagtgtgaaggctggtcaggaacgcgaagtttcgttccaggtataccccgtttttgtgatttcaggcggagatcgagaggttgaaaatagagctgtccacttcaaaagacctcgagaaaggttatgctgcgaagatcgggctcatggagatggagatcggggggttgcaagccgacaagcagatggcgaggaaccagattcatcgcttggagcagaggagggaacagctctccaaaaaggtgatggacctgacttcgactgcacaaggggcgaagaaggcggttcacgatgctaaggtagagctggctgctgcgtattcgaagctgcttgctgggatcaaggagaagtgggtctccaaaaaggagtacacgatgttggaggggcaagcggtcgaggtggagtcaaacctggctttgatcgaccagatcacaaaggctgctatcaatctgccgtggagaaacctcggctacaagcggagctggatgacctagaggtgcggtgcaaatcgaaggaggtatcggactttactctaagcaagttagatctcccgcaggtttcagagatttcggtggtacgtctgatggacgtcgacgagcaagggacaccaattggcttggatgagtttgagagcaacaaagacgcgtttccgggaggtctcgcggagggttctggtactgtctttgctacgccagccggagaatcgaggtagtgatcacttttgctccttgtttgttttaggattttgtgttttttcagacttaatgccttggaaggtttttatcctttcgtttattgctttttgaacttggtgcctgggaaggcttttatcctttgttcgtttaagtacttggatgcctgggaaggtttttatcctttttagaaagtattttttgtctttcattcgagtgctgacacttcgttgattttggtgtatgatcacctcgctttgtccatgttccggataataattggacttgtgtgagcccgagttatttcggatgtgatatggtatattcttcgaaagttaaaactttgaggaagtttgagttgttttgtctcgggaacctcttgaagtgaggtcacacaagggacctgccagattttgggagctgggcttgtggtatcgccaagtcgtgaatgaaaccttcgtttcttccttgtttactatgttatgtgttgatagtgaaagagttagatatggttgtagtaggtgagctccgatgaagccgaagtgatgtgttcttataagtctagttcactatcgactttttggaagcaagatcacaaaatagatccgccaacattcgggtgttgggctttgggtatcgtaagattacgaatgagtttttgcgaaacatgataataaatatcaaaattttcttttattcttatctcgaaatttgttaagtacaaaaagaggtaaagcaagcgacgatctggtgtgattgaactgtcaggtgagcagcaaatcttcgttgatggaagatgtgatgtctgtttcctttgttgaagtttcgtctttcaaatggaagggttgagatggtaattgcgtttgtggagggaactgcctgcatacctggttaggggattaagccccttggtaattcgattgaagtggtggttgcgctcttggggggagctgcctacgtaccctgccaagggatcaagtcttatcgtagttcgattgtttttgagtacctattcgtggtatttcatgagatgcatggcattccaaggccgtaactcaagtactccgttgataacttttacgagcttatagacgccgtcacgtaccacctcgctgattcgatagggaccttccttgttagttcccagttttccagcgtttagctctctcgtgttgctgaacacttttcgtaaaacgagctttcccacttcgaatcccgaattttgatattggagttatagtagcgggcggcagcttgttgatagttttgaactcggatcattgcctgatctctgcgttcatcgatgaagtccatgttgtcctgtaacatttgcgtgttcaggtccgagttagcaggactggcggtccttctcacgcttggtactattttttcgacagggattagtgcttctaaaccataggcgagagagaacagtgtttcttgcgttgatttgcgaggtatagttcggtaggcccagagaactccgtgaagcacgtcggaccacattgattatttggaatcaagtcttttcttgatgttgctaagtatagttttgttggcggcttctgcttgtccgttaccttatgggtaacggggtggtggtggtggtggtggtggatgtggtaagacggatcttccacttgtcgcaaaatgctttgatttttcccgaggtgaggttagtctcgttatcggtgacgatctcataaggtatgccatgtcggcatacgatattttcccataggaagtcctcgacttgtttctcggttacctgttggaaggctttagccgcgatcgagttggtagagtagtcggggaggaccaacaggttttttagtctcttcttccctcggaggcttccatgggacctacgacatccatggaccacttcataaatgggtaaggagaagatatcgaggacatttcctcgggaggttgatgaagagtaggtgcatgtcgttggcatttatcgcacctgagtgaatgagctatgcaatcggctatcattgttggctagaagtagccttgctttttgattatgagggcgagggtacgtccactacagtggctaccacattgcccctcgtgcatgcttttcatgaggtcttttgtttgttgcccgtaggtacacaccatatagggacctgcgacgctgcgtttcataagtctcccttccatgatgcagtaccttgcgctctaggctttgagttttctggtctcccacttgtcgggaggtgtgatcccttgttcgatgtaatcaatgattggaattctccagtcattgtacggttcaggttcgtacgaggcaggttgttcgggggttccgagctccagctcttcctccgctgcacctgcctccacggctgctgcgagggctctagccgcagcggtggtgcttcgggttactggcgtaaagttgcaagttgccgaggtttctatcccagcgtgtttgactgttaggtcaatgctcgggtgttctattccttcgaacgggataattcttttgacgaaaggatctgacgtggaggcgagagctgccatggcgtctgcagaggtgttttctcctctggggatcctggtcagttcgaacgattcgaggtacgcttccatgcgctcgtctttagcttcatattccccgtggaactggctggtgacaagttgggagttgctatgggcgtgtatatcgcggatccccattccttgagctagcttaatgccagcaatgagggcttcgtactcagactcgttgtttgatgcgttgaatccgagtcggaacgattgttcgatgacttccccggtgggggaggtgagttgtattcctactccggattcttgtcggttggaggagccatcgacgtggaggagccatttcttattggagttggttccatccaggtccgctaacgggagctcgattacaaagtcggctaggacctgtgctttcgagctggttctggtgcgatattctatatcgtactcacttagttctatggcccattttgcaagtcgacctgagtgagttggattgtgcagaatggttctgattggttgagacgtaatcactacaatgggatgtgattgaaaatatggtctaatttttcgagctgacatgactacggccagtgccagtttttccattgctgaataacgggtttcagcgtctatcaacgttttactaacgtaatagatcggtttctgtccttcgtgatcttctctcaccaggacgccgcttatcgcggttcgggagactgccgtgtacaagtacaatggttctccttcttcgggttttgcgagtatgggtggttcggacaggtatgctttcaattgtttgaaggattgctcgcagtcctcattccaatcgaactttttatcctttcggaggagctgatagaaagggacgcatttatcagtagacctggatatgaacctgttgagggcgacgatacagtcggtcagtcgttggacctcccgtgccgtttttggcgatggcatgtcgatgaaggctgtaatctacttaggattggcctcgatgcctctttcagttactaggtacctgaggaattctcctgagggaactccgaaagagcatttctcggggtttagctttatctcgaatttgtttaggattttgaagcattctcttaattgcgggacgtggtctttttcgcgagctgacttgaccagcatgtcgtcgatatagacctccatcgttttacctagctggtcagcgaacattctgttcaccaatctttggtaagtagctccaaagttttttaaaccaaaaggcattactttataacagtaggtgcctcggtctgtaataaaagctgttttttcttggtcatctgggcgcataagtatttggttgtacccggagaacgcatccataggtggcttcgaccagtcggtcaatatgtgggagtgggaaactgtctttaggacatgccttatttaggtccgtaaagtcgatgcatactctccacttcccgtttttctttttaacgacgaccggattggcgagcctgtcagggtattttacttcttttatcgatctgatcttgagcaatcaatcgacctcatcgtgcaaagctttagccctttcgggacctagcttgcgacgtttctgctttataggtcggtaggtcggattgacgttgagttcgtgtgaggttacctcgaggcttattcctcggaggttcgcacttgagaaaggttatgagatcctcttgtatcgctgggtcgaggtcttgacctatcccaacgcatcgtttgggatctgattcgtctatgcagacctgtgttatcaatgattttcgaggtccgcgttgagaaggatcagaggatctgactgttttcatttccgcgagtttgtcttctataattagtacttcttgttctgccacccagatcgagttctgcaaagactaggtctatgcgttctctcctagcgggtggaggagagtcacctccctccggtgttcgttcccgtttcttttgtttgggagtttgctcctcctcctgttcgtctggaggagaggttttaactttggggtttgaaccttttttagttttgcccccagttgcgattaattttttaacggcgcgacactcctcggtggaatgtcctttttttttgtggtacttgcaatatttttcgaggtcaagttctggactctcgtcctcagctgcatcttctattgcgagtaaggtatgctgcccttgcgtttggttttcctttttgaagggttttttaattgcaaggggagcgttttgcgttttagattctttgaatcttaaggccagcacagcgagctcctcttcggctttggcgaagtagagagctttgtgaagggcatcgtctaaagagaccggttgcctaacagtgagttcctcacggaacctagaggaaaaccacagaccgttatgaagggctgctatggctacctcctcgtttaggttcgcaatcttcgatttgattgctttgaatttttcgacgtaagatcgcagggatttgttctgaagttgagtgagactccagaggtcggcttcagacatcctgtgttcgataagtaccgaatactgttttaagaaagcggcggcgagctggtcgaaggtatcaagggagaagttctactatccgtgaacgcggtgcgcctggtttctttgatcacgcgatctatgtcgggagcatcgctcactgctagatgcattcgcgaatgcatttgagccatgttcgcatttgtttgagctgcgtaattgcagaatatttccatatctacgacgttacgcgtatcgaccggtgcttagggatcggttggactgttaaggaggtcacttcctggtatccggggaatggatggcggattagcgatagaggttcgttgttgcgttgagttcccgggaaagcgggaactggacgcggttgtttggtttctcgtccacctgtacctaggaggcgaatagcccagcggtagtaaaggtggggctggtagccttgggaaggcaggcgttgtgcttgtctcgtttcctgttgcctggttttcgacgagagtgttcgcaggtgcctgtaaaaaggtgacctgccggttgataggaggtgagacgtctatcgaggcgaagtctagaggagtcctcggagtaggatcaaccggggagacggtacttgtcagatctatggggacctgggcaggaatcctagtttcgcgggggaacttcctttcccgcggtatcgcgctctacctcatgtgccatgcgagtggagtcgccctctctgctgacccacaaatgcggctaggttgcgatgcgcaatttcttggtttttggttaagttgatcaagttcatgatcattgcgcggagggggagtgatttggtcagatccagaagaattcgagtttgggagatgtcctccgcattagcgttatggacagcatcaaccctggttccgagagagagatccgttgggaggtgctagtccataacgtcatcgtttgggatctgaactggtaagccagatcccgatgaattggatgaattgggatccatgatcgttggtcacaattgatgtgttagtttcggtgttggaatgatctattttcgtcccacagacggcgccaaatgtgggttctgaaatccacactagagatttgtaattgagattatgagaaaggagggctagatcttcacagaaaccttgagagttatatttctaagaacgaatggactttttgtattgataatgacaaagcttttacaatgtgaaaggagattacaagtgtaaaagtatgtgggtgaatgtaagcttaattgaatgtcccttccaagtcgtccttgcttccttatatgggtctacgcacgtggtagctccatccgggatctgcggagatcctcctggatattcggcaggtcagttcccagatatcaggtccgctccgcgaatatctcctcatcagttcctaggttgttattcgcttatctcccttcatcaggtgaccgggcttatctggcccaaatacccattcgcgtatgtgggctcatcagctgcgtaggtcctttacttgatgggcttttgtgggctggcttggtattttcgcaggtggattcctggaggggaatccagctccaacagagatccaaggattgagagaaacttctgggataacattgcccaccaagtgttcgacagatttctcaagagagatgtctagttttttggttggtatggcttcaaaacttgtggtgatgacttgatggagctcatgatgctctagattcttcatcgtaggacagttgtcacattttttttcagagaaaaacttagcaaaaatttcacgcattcacataatttctcagagagaaacttagcaaaaacttaaactataggtcatatacaaagcccactaggcccatatcatgatctatcatatatataccttgagctgatcaacaaaacgctgctgctgttccgcaggatcattcaactcggtgtaggcattacaaagctgcagccaaacaaaaatcatgattcttatataaaagctcacttcatgttggttgacgaacaactcaaatcgttcagtaaggaactcgttggatctgtgacattttgttaagaataagaaacgtaatctctatttcttaacttccgatataccgtttcataagagattgagccaccggcacatcaccgattcataactctctctctcacaagcgacacatacgtcactgaacattcatcaaacaatgcattaaaatctttctttagaagctactctgtcttttatactttgttatgttcactcgcttatcttcagtttagctcatgtgctccttagctgccatctcgctcgcacgtgtctctcttctcttctttcttgtgtaaaccattaatggcttatcaatacccctcccttcgaagaaagcttgtcctcaagcttgtgttttcattttgtcttaggtgaagaaaccataacgaaagaggaaaccacatatatattcctggatcaggaggaaatgtccaccaaaatgctaactttcgtacatgaatcgcttcatgatatgagccatcaaacttaggtggcagctgcaaaatcaactggtgtatcaccccatgaaaccgcttcatgtgcacatgttggagccatatacacaacatcgtcactgttgaacgtataacaaccaacaaaaatgtagaagttgcaggttttacgttgacaatcggagaccaccacacaacattctgttgttcgttgtcgaacttgtaaacatacaaaaatccatgctctctgttttttccattgtttttccaccgaagccacaccgaaaagaaataattccaatcaaccacttaaaatgctttggttttgcttctttgatcatcattattccacgtgtattgttgtgcttgaagcaattgttgcttgacttgtattggtgccagctctatttccatacttgactttgttctgttttttaacttgaatctccacgatttgaaaaacctcctcttcttccttttactttgtagtcttttaatcctatgaggacccagttgagatgcacaagaaggttgcactataacagtctcattcagagatatggtcacatgtgcatcatcgtgaaacatatgagattgtttctgtagtcgaaggctccaaaatcttcttctcttcctctctaatccaactttagcatgagaataaaaactaatggattttctatctttgctatcaaaaagctgaggtttgaacttatatttccaagccttaggatactttcttggttttcttttctcagtgatacttctggatttatgatacaaacactccaccaaggaattgtttctcttcttaatcatccgaggatttagaaccaacatcttcttgcttctagaactctctttgattaaagccatctccatgccggattgcttctccgaaagaatttcctgttggtggctcagttctatcaccaaaagggaatccttgctctgccacgtttttggttttggaagtgagtcagttaccaaacacaattcctctttatcagcattagctgccattgactcctttatccatagcttctcttgtacccaatatcttgtatgtggcatgtttttgaacttgaacatccaatttttcggagaaaaactcagcttcctcttcttcagtctttctttctgtggtgacattatatcgagcacttggtatgtcttttgctggttagtgacacatgctgactttggagacaacatatacacttcttaaacacataatatttgtaatttctcttctggatgaatcaataaagcatcaacgccagaactagagtggaaatccttacaaacagctggtgattccttgttaaatcgaatggttggttccaattttgaaactggtacctgtggagttgacaaaatcgcatctgcgacagcgttgctatccacttctatcttcgatgtgttcctctcctcaaagatttcaacgacattatcggaggagtcttctgcaattttctgttgaatagggtttttctcaaccgtaatcgtttcctgaagtgtgtccattgacgaaatgatacagtattacacgtgagagttagcacgtgcgaaacaaagtgggaaaaataaaagaatctgggattgacacgtgacaagcgaggattcgcagatcagaatttgtcgttagtcactataagagcgtgtgtaactcgtcactttcttttcatcgaataaccctgtaatctttgaatattctagaaccttgtaattgctagatcctctcgccttgagagttagttgatcattggtgttcttcatgaccgtcgattgatttgtttgggttttgaataataaacagaggttttgattgttcttttggattggagaagtttattgtattaaaggtattagagccattcgtttctcggaatcatggtccagacacgttctcaggatggtgaagcacgggagaaggggttggaagttttgtatgattggccatggtatgtgcagttgctgaaggaacggtttgataatgagtgtgatgatcctatggctgagttgaagaagctacaagagacggatggagtggtggactatcatcagaagtttgagttgattaaaatcagagttaatctttctgaggaatatttggttagtgtgtatttggcaggattgagggtagacacgcaaatgcttgtccgtatgtttcaaccacagactgtgagacaatgttttaggctggcaagattgtatgaaaaggcacaatttaaaaagccttattctgcacattggacacctaaaacagggggagctactttgaatacgaaaccaatgcgagagcctgagtcacaagcaggtcactatactaataagactgtttctaaacaaccaccaaatactaagaagttgtcgcaacaagaaatgagtgaaagcgagctatgggactttgctatttttgtgatgaaaagtacactctggagcactatttggttcacaagaacgcaactgttttgtatggatgtagatgatgagtttgaggatgcgagtgaggaattgttgaatgaggatgaggagaacatgcctcagatttttgtgaatgcagtttcaggaatatcagattacacgactatgagagttaagggaatgtatgacaataaaattctctttattcttatagattctggttctacattcaactttattgattctactatggctaagaaattgggttgtaaggtggaacctacaggtttgacaagggtatctgtggcagatggcagaaagttgagggtagatggtaaaattactgatttcacatggaagctgcagactacatcatttgcatctgatattctaatgattcctttacaagtcattgacatggtgttgggggttcagtggttggcaactttgggaaggatttcgtgggagtttcagaagtttgagatgagattcaagtacaagaatcagaaaattttgttacatggtcttcagtcggggtctgtgagggaagttagagcacaaaaaattcataaaaaacaagatcaaatgcagttagctatgttgtgtgtgcaggaggtgtcagaacaagaggaggagcctgaactttgttcactcaatgtgctaacaagtgaattggttacaaactcggctatggagggggtagtggcagcatttctagatatatttgaggaacctactgagttgccgccgtttagagcacaacatgatcataaaattaagctactagaaggctataacccggtgacccagcgtccttaccgctatgttgtacaacagaaaaatgagactgataaaatggtagaagatttgttgttaagtgggacagtgctgaacagttcaagtccttatgcatcgcctgtggtactagtaaagaagaagcatgggacttggcgattgtgtgtcaattatagggagctaaatgggatgactatgaaggacaggtttcccattcccttgattgaagatttaatggatgaactaggaggggctgtggtattttctaagattgatcttcgagccggttatcatcaagtacggatggctactgaggatattcacaaaccaacttttaaaactcatagcgggcactatgagtatttggtgatgccttttggcctcactaatgcccctgctacgtttcaaggtcttatgaatgctatattcaagccttttctgaggaagtttgtcttgttttttttcgatgatatacttatttatagttcatcgatggaagagcatgtacaacatcttcagcaagtttttgaggtcatgagatctaataaactgtttgcttagcttagtaaatgtgcatttgctgtttctaaggtggagtacttgggacattttattagtggaaagggaattgagacagatcctacaaagattaaggcagtcttggaatggccaaacccaacaacactcaaacagttaagagtatttgtgggctagctggttattacaggagatttgtaagaagctttggggtcattgcagctcatttgcatatgttgacaaagatcaattcttttgagtggtcagaggaagcacatgaagcatttgatggtttgaagaacgcattgtgccaagcacctgttttagctttgccactttttgataaacagtttgttgttgaaaccgacgcttgtggccaagggattggtgcagttttgatacaagcagggcatccattggcctacattagttggcagttaaagggaaaacagttacacttgtccatatatgagaaggagttattggtggtcatatttgcaattgtgaattgtgatttactgaaagatatttaagcagggtacactactaatgatactttaaaaactatcattgctgcacttcaacaagatgcttcatctcataagcatttttcttggagtcagaatattttgaggaggaagagtaagattgtggttcctgcagacactaaaattaagaataatatcctcaagtggttacatgattctggcattggtggtcattctggaagggatgttactcatcaaagggttaaagggttgttttattggaagagcatgattaaacattcaagcttatatcaggagttgtggtacttgtcagcaatgcaagagtgatactgcagcttatccggggttattacaaccattgcttattccggattcaatttggagtgatgtctcgatggactttatcgatggtctgcctatgtctaatggaaaaactgtgatcagggtggtggtggatcactttagtaaagcagttcattttatggctctatcgcatccctatagccccttgacattggcacatgcctatttggataatgttttcaagctgcatgagtgtcctacttttgtccaaacctcagcaacaaacgattcttcaaatgttcccatgatcaaaaaagaaacatcttttatcttctgtagaaccaagactctgcttcgccttcaagaagactttgtgcaagattcttcttcttgctttcgattcgaccagagcacactaacgcaccatttgttaagaataagaaatgtaatctctatttcttaacttccgatacaccgtttttataagagattgagccactgacacatcaccgattcataagagattgagccaccggcacatcaccgattcataattctctctcacaagcgacacatacgtcactgaacattcatcaaacaatgcataaaaatctttctctagaagatactctgtcttttatactctgttatgttcacacgcttatcttcagtttagctcacgtgctcctcagctgccgtctcgctcgcacatgtctctcttctcttctttcttgtgtaaaccactaatggcttatcacattttcccaagggactcataatcttgggtttgttcattatgaaagtagggttaacacacgtcacttccagaaagtgtccaacaagctgcacagtgaaaacattaagcatatgaactaatcacataacttcgaatttaatactataaggggataacaaacttactttatccaacaaatgagctgtcgtcagaggaggtgtgcatctgacatcaaacctctcacacgcatcaattagatacttgttagcttccttgctagccaagtcttttgatatattaaggttggccatcttttctaaatctacaatcatgtcaaccctcctacagaaataaagaaatatcaaatcattcccaaatccaccgagaagaactctgtcttgaccaacaaagatatttcactaacctgaatggaggagtgaagtcaatttcaattggctctttatcgtacccattagcgtggtatttgatcttatatccacctgttagtttcttcaccatacctacgacaggaagaaaatgcttaagttttgttcaaaacgtaaaattagcactcagtgcaaacagaggtatttgttggaagtgatcaagtcatcatcttattttagaagagtcatatattatatagttaagtaactgatttatttatattcgtatcacacattgaagagattcaaatagaattgttaacagcaaaacaattacatgtgtgtatgtgtctctacaatgggttgtcttctagagacgtgtcacttagtcaaaatgtgtcatgtaaacctataaatacagtttatatatctaattaaagtgtatggttttcgttttacaaaaacagagaaatatagagtaagacaaatcacagttaaatatgtgttgtccgatccttaacaactttgagagttcaaagttcaacatggtatcagagctatggagaaaacaatgcagcaagttattccaatcttcaatggtgaatcgtatggcttttggaaaatcaagatgataaccatcttgaaaacaaggaagttgtgggatgttatcgaaaatggaattacgttgagttcgttgtctgaaaactcactagcgttaactagagagcgtgatgatcaagtgatgaaggatatgatggctctttagattcttcaaagtgcagtttctgattcaatatttccgagaatcgctccggcatcaagcgcaagagaagcttggaacgctttggaaatggagttccaaggaagttcacaagtaaagatgattaatcttcagaccttgagaagagaatatgataatctgaagatggaggagagtgaaaacataaattttttcacaaccaagttgattaatatgagtaatcaactaagagttcatggtgaagaaaagaccaattaccaattggtttaaaaggttcttatctccttgccgcaacagtttgatagcatcattgcggtctttgaacaaacaaaggatctatcaactctctctatgacagagatgataggtactttgaaagcgcatgagaagcgcttgagtctccgagaagaacgtatcaatgagggtgcattttatggagaaaagcttggttcaaaaagaggaaacaagcaagacaagaaacaccattggaagaccaaagagtggtgtggcgtttgtgaaagaaacaatcacaatgaggtagattgttggtaaaagaagaacataggtgtgtgatagacttagacgaagtggaagagcacatctaaattttgaagagttagaagatgacaatgaagatgaatgtcatatgctatttagtatcgttaaagaggaagaagcgtcaaaaggaattgacaaaacatggttagttgacaacggatgcactaaccatatgaccaaggaagttaaatatttcatcactcttgatgaaagtgtaagagttccgatcaaattggggaatggtcaacatgtaatgacggcatgaaaaggaaacatcgaagtgatgacaagccaaggagagaagatcaacaaagatgtgtttctagtgtcgggtttagcgagaaatatgttgagtgtttctcaaatgatatccaatggatacagagtcttatttgaagataaaagatgtctcatcaacaatcctcaaggaagaaggatactggatattaaaaggaaacataagagtttcccattgagatggagaaagtcggacacaagaagtcaaacaaatgaagttgaagagatggctcatatacatgagatgtgtcttataacgtccaaaaaaactcagaatttggagggagcaatggagacgtgaagtggatagaagacatgagagaagagttgatgatgatagaaaagaacaagacgtggcaagtgttggagagaccaagcaattggagctgatcagttgaggacaagaaaagtacaagtggctatgtctttacttctggataaggtgcattttgttggaatactagcaagcagaagaacgttgctcaatgaacgaccgaggcggagctcttaatcacatcaaggttcgaagttctacgagaacaactagacgtaacgatgaagccatgatcaaggaggagtgttggaagtgatcaagtcatcgtcttatattataagagtcatatattatatagttaagtaactgatttatgtatattcgtatcacacatcaaagagatacgaatagaatcgttagttgcaaaacagttacatgtgtgtatgtgtctctacattgggttgtctttctagagacgtgtcccttagtcaaaatgtatcatgtaaacctttaaatacagtttatatatctaataaaaatgtgtggttttcgttttacaaaaacagagaaataaagagtaagacaaaacagagtaaaatctgtgttgtccgatccttaacaactttgagagttcaaagttttatagtattcgacataccactgagcaaattctcacacatctccatcaagtcattgtagtctgcgtaagccttatagaactcgcaggaggtgaactctggattgtgtgtcatgtcatgtcaataccctcatttctgaattgctttccaatctcgtaaacacggtcaaaaccgccaacaacaagctccttaagatagagttctggtgcgatacgcatgaacatcttaattttcatatcattgtgataggttgcaaatggacgttcaactgctccaccagcaatcatattcatcataggtgtggagaaaagtgtaacgaccgcgtcccgcgttcataaaaaaggccggtttgttttaggagaaaactagatcatggtcgaggaacggaccaaaatacttagtaggaaaacgagaaagttcaagccgaaccagctaggtgagctggacaagctggatgaactagctagctaagctaggtgagctaaaccagctgtaagactagctagctcagctaggtgagctgatcgacagctcgactgagctcggtgagctagtcaagtactgacccagctgggtggtccggtcagctgacactcgagctggtggactgtggtagctcacgggtgaagaggtgtctcggccaaaggtgtaaggtcgagcgggtaccaacgaacggttgcatcgcccaaaggatgcaaggaacagatgtgacctttcgaaaggatgcaaagaacggatgtgacctttcgtaagggtgcaaggaccggatgtgatgcttcgggaagcatccattcgcctcctatataagggaggacgcccaaggcatctcacatcatctcacaacatccaaaacaccataaaacattcttaaaggagtcccaacacatcctagagttgttggtcggaaagggggtgcggctcggcgagtataactcgaccgaaccgatgcgcatgctacctcccggtccaacggttcgatggagtgtagaggatggagagggtagaccgttcgtcttagagacgaatcggatctggtagaccgatcgttggatcggatcggccagaccgatcgtcagacggatcggatcggccagacggatcggacagaccgatcgtcggacgggtcagatgggactggccgatcgtctgacggaacgggtcggacagaccgatcgtcggatgagatggatcaagaaaagtgttcgaggaagcacaaggataagtgcatccgaacacacccaagggtcgcccatggatgcaatcttaccgataaagggagaaagcaccaagaatgggtaaggaacgtgattcaccatataggatcaacatcgcggccgccttcatgtatctatctccttagccatggtgaaaccgatcagagatcggtaagaccaaagggtgactcgatggataaccaacgggaaagtccaccgtgggaaccgatggacaaaacggatgttggacccgcgagcaaacctaaggccgacggaagaaagatttcatgggctagcctacgatgatccagtggatgaatccacggacccttgggtgtgataaggatatcgttcggaccgcatggatggatcattaagccgaaagctttatcgaccaccatggaccggacgggtaaacggttagtaaaccgtgggcggtcgtagtgttaaacgaccggagcggaaacatggatggttcgataagccgagggctcaatcgtccaccatgtagccggaggggcgtacgtttggagaacgaatggaccaataagccaagagcttgattcggccatcgtgaaccaagggaatcgtacgatccccaatctctatcgttgtacttagaccagtggggttggttggttgtatggctaagtaacgatagggattggttcatcaattcacgactgatgacgagtcgttgaacgaatggagtaaggcgacaaacgggctaaggaatcaaatccgcatattgaccaaggtatgtaacgatctagcttattagttaagatagacgtttggtaattgaccgtgaaagtaggataaaggaatatgcgattgtttggcttagaatggttagcgaacatatgcatgtcttgaccgagtaaaggatcgatctaagtctaaggaacaaagacgatgaaaccggtacaagagttggttagaattaaaccaaggttagaaagacttccgctgtgtaataagagagcgattatagaatttagcctcgtaaaggcaattctatgttgaatcgcgaaaaattaagaggttcggccgggaagaggcgcgaacttgagtacaacgtcgccggacgccgagacgtccaggacggggtctcacaaaaagagtgatagagattgcttgttaaagaaataaacagacacaaaaattggtaaccgagttcatggcctcaaccgttacatctcgggggagatctcttgctcccaaagcttcactatatcaaaggaattacaaacacaccactaacttgtgatgttgtcttttggtttttacagatttgcactcaagaagaacaaatatttaagaacaacaaagaggaagaagaaagcttgcttaggaagctctttttatctctcttctctagaactctctttagattcttttctcacctacttccactacgttgtacgttgtaatgcatatataggtgacataagtgggcccacaaacttttgcttacacttttgttcttctccaccttccaatttcgttggcccaataaagcccaataattgtgttatgtcaaacccaaacaacaattctccaccttttgacacaacacaatctttctcgacgaaatcgttatctgaaaccacctctttcctttggatgttgagaagctcgcagcaaagctgaaacttctgaccaggtaccatcttagttaggaaatctgctgggttgactattgtgtgaattttgtgtaaaactacaccgccttgagacactatatctctgattaaatgaaatttagtctctatgtgcttggttgttttgtgatgaactgaactctttgctagggctagagcactctccgaatcacaatgaaccataacactgtcttgtttaaaacccgattctgaacacaaacctttcaaccaaatggcctctttcactgcttcaataagagccatatacactgcttttgtggttgaaagagccacaacagactgtaaacttgacttccacaaaattgtgtttccaccaactttaaacatatatcttgtcactgatcttctcctttctaagtctgttgcataatctgaatatgaaaatcctttaatgcagaatttagaatccttcttaaaagtcaagttttgagtgtatgcaccttttcaacaccttaacacccatttcactgctgaccaatgctcctttcctagacttgatataaatctgcttataaaacccactacaaatgctaaatctggccttgaaccaaccatgacgtacattaaactccccacaacacttgcatatggaattctttccatgtgtatagcttctgttttcttttcttcttctgacaaacttctaagtttgaagtgagcagcagttggtgtaatcactggtcttgcttcaagcattccaaacatttttaaaactttctccaagtagtttccttgagacaaaattaattctcccttgtctctgtctcttatgatatccatacccagaattcttgaagccttccccaaatctttcatttcaaactcacaattcagcttgtttttaaactctcgtatgacagccatattccctgaagctatcaacatatcaccaacataaagcaacaagtagataaatttgtctgtttgagtgactctcatgtagacacatgggtcataactgaagtaatagaaccctaagtactttgactagaataagaacacaactccaataaacacactttattagaacaaccttcacactaatcaatcacagataagtttggacagtattacgcaacatcaacaacctgatttgattcagtcagatcctaaaactacccaaatcacaaacacagcaacaaccgtgtactcactttgttcactcaccaatgaaacccacgagacaagttcttcttaacttttctaatcttccacttttgacaagtaaactggctaaccataataagagaccaacgcttctcttatatcttgtcttggaaaatggaggatgcttcactttatccaacaggtccaagtgtagctcctcatcattatctagacactaggaccatgtcctatgcctgacgacttcgtctcctttgtctaaagtgatacgtcttttcttcactccaaccaacacgccacattggcaaaagcaactgctgctttcccgcttcctctgttctgctctgtattgtttcggacatgcctgttgaacttcagacactttgtttcttcaatttccccctttttatctgactgtgacaccacaagtaacctgcaaaagattagagacaaccacatacaagctaagcaatattccataccaacatagaattcaaaaaccggattttaaacaactactgccaagggcataaccattaaaacctgaaacacatctgagttcttggttccatacattagtccaacattaaacacacagaaaaaccgataaagaaaaagaacagggagtttccacaaccacaaaacaatgagtgacaaactccccctatcaagatacacatttaaagaccgacaaggactaagcatctaagcattgtcatctaactcatcatcatcgtcctcttcctccacattctcacctcccatatcatccggaacagagtacgtaacatcaagtactccccctactttagtgcacactcacataaaagaccattctcaacagataacagagtgtaaggtgagagaaagaggcttacctgcaagacgcagctgcatcgttgtgagggatgcaatgaggttctccaaagccgcatccaaggtagggctgtcagtcggtagcacatgcactggtttcacttccatggtgaacttctcagtgtagatgataagtaggaggcctacttatatgctgaagtgaggttcagttcaattccccttaaacactaacatgtcgatgcagctatagggggtgtcaatccagtccactgttactactagcaatcaagataacaactaggtcaagccacattataatgattgtgggtttctagtaacaatcctaggtcaggattcaaacaggtaaaaatgagaacttaagagccctactcgatcattgggtcgagtagaaccaacatgtaacaatattaagaactaaaatggaatcaacagaggatacaaataacaggtaaataaaagtgcaatcagggggtgaatacaaataaatctaagaagaatagaagtcctaaggatggattcattgataaggggaactctagggttcatcaggtggctaacaggcgaaaggcaggtaccttagacgatagattcaaaaactatgtcaatccactctcatgacagagacccccataactctaccacttcctaatctcaactctcgttgatgaaacatagtagagcagagtttaagcaacaatctaccaaagccaatatacagactagccaatctcttggtctatagtctataatctctagaattcgtagatcaggcatccatttgaatgtcttttgtacgctggacgtctatggtcgaaattccatattagccagcgaaaaccgcatagaggccaacgaatccagaagggatctaacctaatcttaaccacctgactaacctagagattgcccttatctaatccatcctcaagaaccctaatcactactcaagcaacataactaagaacacaaacccagaaattactcaaatcataccaaaatatagatctaaacaaactaaacaactttactgaaagaactaaatgcaaaaacaaaatagattaagagtaattaagttttgaagattcaagagcacaaagaaaaactaaaggaaaaaagctagatcctttggacaaatcctaaagtgatttatttatagtaaaatgttgaaaaacctatattcactagaagacaagagacttgaggcggtttgggcgagtgctcgatcttggggatcgagtaaagagggtgctgcaaagtctgcacctttgtgtctatgctccgagtgatcaattggtcgagtagatgcttcttcctctcttatatgtatgctcaaatgtctggttgagtggggaatgaggaggatccgaagacgctttgatagatcaacaagtcttgtagatttggtcgcccttggtcgagtaaatgggtcgagtataggatcgagtaggaggggcgagtagatcgatatgttgctgcttctaaggctgccttgatccagtaagttggtcgagtgaattgctgcctcctttgtggctggctgatcgactgaactggtcgagtagaattctctactgcttccttgttggttggataaagtagagtgtcgagtagaatccttgtaagctccttctgcacctgaaaacactgaaacatgcaatatgtatgcaagatgatcctaaatgcctaagtgtgtaaaataagctaaatgtgatgcaaaatgatatgaaacaatgagtgatcactaagctaaatgatgataaatacatgcctaaaatgagtaaaatacagtgttatcaactttcccaaacttatctcttgcttgccctcaagcaaacaaaaatcttaagtttgaaggtggggattcaaaaacagaagcatgaatatagaacgggtaagctcaatgtctaggtagctaattctaggttgcaagatgatagacccttacttaaaaacgttagccatactcgtcacaatgcaacctaacaacctgccttaatctattcaagcattctcatcaaccaattccctttaacattcattaagcacgaacagtgagtcaagcaatgcaatggttatgaagtcacttggtttcgggcttaggctaagagacaaaaatggtccctcttatgatttggtcgagtaacagtggactctcagagaaaagattgagctttagtagaatgccaatggacacatacaagaacagatcccatctaccaaatgatatatactacgatagctcagaagatgatcacagtcccatagatgtcctaactctacctttttctcattctttctctttttgattcaagttctaaggggttcttctttaaaacgattcaagagtctagcgggtttggttttatactttgacaaacttaagacttttcttctaatcttagcacatagggtgttttacccttttctttgaatcacaatgcctaacttctttgaattccaaaccctttactagactaacactttttgtatcccccttaagaactctaaactcttactttctttttgtttcttttcttttcttttctttctcattctcattcccattcaatccatacacaatctcaatcccaaatgcaagtctccacctagtcctaactaacccaaaaagcgtgggctaggtctacatgaaaggctgctcttgtcggctcatacctaacacgttataccaagctcaatcgaaaaagacctcacaatcacacaaaaaatgatctttggcttgaaataaggctaggctaagggtatgggaaactgctctaaaaatgagagtcaactacttggattaacacagggtggtgaagtgaataacataatccaagtatgtatatggtagccatgagttcacaaataatgcatagacatgataattgcatattcagttcaggttctaatagatagggaatgacatcagaaaagcgagtttccaatcaaagcagtatagtcaagttgtaaattcaaagcagggtgcggtcttacttcacagaaacaattgattatgcaacaaagaactaactacctgggcattgaacttacttcattgactcaaaacatgcttaacggtttaaaatcataattatcccctatgcaaatgagcaatcctaaatgcaaacacattatatacaatccttatacgcttctttgacttactcctcttctccttctccctaggttgaaaagatgattgcctcggtggtgaaggtgcaacatggtgttctcttggctcatatgaagactgtcttggtggcgaaggcggatcatattgtataggttcatgtcgagtggatccggttctcctaaaaggcatgtccggtggcatcaccgtagtagaagaagaacagctgaacttgagttggagagcgttaaacttcatgttgagtgctgcgagagccttatcttgaagtttacaccagctttggagaaaaccaagacgcttgtgaatttccttcgagtctttactttgccttggcgcggagtactcttcaaagtaaaactgttgtgttgcgtaagactcgcccatgggttctgcctcatcatctgaatgatggattggagcctcatcatcgttcactccttccatcggcatagcttcatcacctgaagtatagaggttctccactggtgggcaaaactcaatgttgccaccatctctgatcaaagtggaagcgggatttggaaggagaaaaatagattgtcttgctgcggggtgatcgaacctatatttaaagaggccattcttctgttgcgaccaaaaacaattggaattgataaggtgttgcatatcaatccagctcggaggaatcgttcgaatgcagaggtacaatgcatgctctcaaaattggggtcacaactcctgccacaaccattcttcatagtttcttaagtcccttagcccatcctctataacacagcagatgttcgattatgtataatgagactgaagcgtctgcctgatctccagctagaactgtaccatctgatgctaaatcatatagctcctacaatgctgtctccattaattctagctctccattgacaaaggtcccattcctctctcttgcaaatagtgcactggctaaagacctatgaaagtatctaaccaccggaaagcttatctcgttgctcttggttctagaggatgaaaacccatgtttagacccaagcgtggcccagaatgactgaaactctatcttgtcaaaacgatgactcctgtcttttcgcttggaaatccatacatcagttcgagatgctcgattggaagccgatactctacgtcatacacacagaactccaggtatcccaaacttccgtctggcctgatttcaacgtcttctgactctccatattagaacaattccacggatgaaagaaactggatggtctcttcctcataccctccattggccgaaacatgtgaatattcaggctgcactaattaaacatgtagtctacatcatcatagatgccgagtctctcaatggtctcgggatgagagtattgagttcctaaaaactcattgcggttcagaagcttgtagtactcgtttcgagttgcacacttctttgattccaaatcatcaccatctcctctctctttttgatcagcttcctctggtgaagccatttcttcctcagagtcttcatctaccagtttcaacctctttggtttcttcactcgatcggacggtggagaatgctttgcttttaatcactagatcaaacggaccagaataaacctcaagaagtcactcgatcaaacagtggtgatgcttctctcatttggtcattcaaatcaacagctcataacactcctcgtcattcgactcgatcaacggttgagatctttcttgacttggtttgaatttacacaaccgttgactccatcatggtcaatgaaataaacctgaaacacttaaacaaaaacatcaaaaataacaagaaagatagaaagttatatatatggatagacacgggactccctcccaagtgagcttgttttaagtcactaagctttactcttacagagcttagtcaaaaagaaggttgaagagaggaacagagaagtcctcatcttcaatggttgaattttcagtttctgaatcatattctgcatcctctcttgacaaatggtaggatgagtactcatttgatttttcttcaaattaagcttcttcttctgaaccaggctcctttgaccaatcctcaatttcaaaattggggtagcctttaaccatttcttgaagttccagaatgctgctgtttaactcttctatcttgtgagttaactttccaattgtatcctcctaagctttatatccaatccagagctctaggaattcttcagcaacagaatcatgaatcaagtgttcttcttcagaagaggggtcggtgggccgtttaggcactcgtggagaataagtcggaatgggggtttcctcctcactcaacaacttgctatctaggcttctttcctctaagtgaactcctttctggtctctggtgcaaaccattctgttgtgaaattgtcgtcctccttgatagctagtgcaatttccatcttctctgggtcaataccatttgaaaacttattaactcttttttcaaacatccatagttgatctttcagcttcatcacccttgaagataatccctctatgactctgctttgccatttaaatttttttctcatctcataccagtcatcttctgtaggatcttcagtttgagataacccttctattgctctcttcttgtggtcaaaagttctcttcagcttgctgagttgagaagtatagttgacttttggtggggttctagcttctgtttcttcatcaacatccatgtcctgaatcccaaaactctgacctcctattgttgatttctctgaagcttttctgatgtcaaacttcatcttgatgcctttttcagggttcagattaatttttccattcctgacatctatgactgttctagatgaagctaagaatggtctccctaggatcaggggatctttgacttcttcatctacgtctaataccacaaaatctgtagatatctcaacatttccaatcttgacaggcaaattttctatcagaccattaggatgtgcaacagaaccatcagctaagagtaaagctaagttgcagaacttgtattccatgatccctagctttttagctgtagagagagacataaggctaacgaatgctcccaaatcacaaaggcacctattgaatgtcaatggtcctagagagcatggcagagtgaatgaaccgggatcatcaagcttttcttgtatgtttcttgagtgatgacactgctaatcatctcttgattttgacctttcttgagtttttcaatttttttttttttttagaatagtgagtattcagcaaaggtgtgtgctctatagtccagatcaattgttgggtggcaggtgcagcaatttgagttgaattcccccccccttcttgaagcatattgtcctcagtattgggagtctgatgacttggtggagactcaccttcttggtggatgatgatagcatttgcagtagcatagtccttaggattctggactgctttccctggaagttgatgatgatgcttcggagtagatgttgatgcaaattgactctccacatactagattttggaattcagagcttcgaacttgacatttagatcgttgtaagaacaatcgatcttgttgtgtaattcagttatcttcttgtcaaaagccatagcgccagtagcttatccttgaatgatttgttgaataagttgcttaatttcaggatcttgagctgttggggcttgttgtggttgttgagtgaaccctggtggattcagctgttggtatcctccattgaactgttgtttcgggacataaccttggttatactgaatgatatgttgcgcttttggtgtcttaggtcttttagttttgagtcgtttgtcgtgtcatagtccgtcttttgcgtcttttcggttgtgtcttgagtcgtttgcaggttttaggtgtttaagtgggatgcggatgctttcgagacttgtcaggctcatttggaccaaaaacaacaatggaaatgaaggttcagacccgccaggatgggatcgatcgatcccaggaggggaccgatcgatccaggtcatcagccaaatgaagttcagacccggcaggaagggatcgatcgatccaagtcaagaaagattggagtttagacccgccagctcgggatcgatcgatcccaaggggggatcgatcgatccatccttttcgatgaccaacccggttttccttaaccgggtttatcttttcttttattgtaattgggtataaaaacccgaaaaacctacgttttcttttacgcatctttttctgcaacatttctgagaacctttttgtaagcaccttttggattagagattcattccttcttgacaatttggagaagatttctaaaccctattctcatttattcaatttgaatcatgtctactttaatacctctttgtttcatttctattgcaatgtgtgagtaatccaccagttaggtgttagggttctaattatgagattcaatggatttaatggaataattggtatttggaattcttattctctgggttctttgatttacatgttcttaatgctagaataggattgatcaccctgttttagaactgaggttttttttatgcattaaaagtgttcgatagaatgcctgaaagaatgtgaattgagcaatgtatttctagctaacgaaagttgaagttaggacgcattgtgaactaaatgaacttgtttgataacgcaaatttgactaggaaattacatgcgaatgtttagtaatcgagtagtcaaattaagtgattaatgtcttgaaagggaattggtctaacttgtgttcatgttcaagaacagttcgtaattgttgaattccttgtctcatgtttccattgtttattgttctctgaaatatcctaatgcctaatgtctttaaatctcgaaagttaaatcgtttaatttatatgcatttttatttacaatctgataactcaaacaaaaaccatctttccgctttagctaagaacgagtctcggaaatctttaaagtatctttggtccttgtggatcgacctcgaatattctacttcggttagatatttcgggtaatcaatcaagttggcgccgttgccggggaccaattacgttacctaaggatttaggattagtttttagtctaaagcatttttatttactaatactgatattcatttccgtgttatctttggtgttttcaggtgtatgacccgtagcaaaggctcatcacatctagtaaactaccacgaggatatcggaaggtttgaaagagagaacaagaaaaagaaacagttagcggttcagagagaagctgaaatggataatgttgtggatgatgatggaatccaatttgaaggagaacatcatggagtgtttcaagatccaccacctcctgatggaaatcttcctggtgatggtggaaacgctgtcaatgcagttgctgccaacgctgcccgtgtagctgctgctaatgctgctcgtgcagctgcgctgaatgctaggcctgcgcctgctcggcaaactctgagagatcatgatgctctcaatattgaattattcagagacaggaaccaacagctccctatcaacacaaatgactttgagatcaagaccgggttgttagctcttgtgaaacaaaatcagtttttcggtcttccctctgagaatcctgtttatcatctggatagttttgaagatatttgcgggacaacgagaatgaatggagtgccagatgatcttatcaaatgcatattgtttatattctctttggcagacgaagcccaccgctggtttaaatcgatggattctgcaaatctgagaagttgagaagactacaaagctgcgtttttggggcagtatttcatgcagtccaggacagctctactgaggaataagatcagtagcttccaacaaggaagcacagaatcattccatgaagcttgggagaggtttaaggactactacagggagtgtcctcatcatggttttccacgggctacattgatcaacactttctatcggggagttgacaaggcctacaagatggcattagacactgctagcaatggggacttcatgaccaagactgagattgaggctacatagctaattgagaaccttgcagctagcaacagcaaccacaatgttgactatgacaggtccaatagaggtggaggaggagaatcgaaacagcttgctgaattgtcagctaaggttgagcaactactcaggagagatcagagggttgttaatttctgtgatgacactggggaagctcaggtgtaccaggagtttaatgggaatggttcggaagataatcaggctgaattgaactacatcaacggtcagggcaactaccagaacaggggattcaatctgaactacagaaaccatcttaacctttcctacaggagtaccaacgttgagaatccgcaggatcaagtgtatccagcacagacgggatcacagggtcagcagtttcaggccaaacctttcgtacccagacagagaaatttcaacaacaagccattcgtacctaagccacagacgcagggcaatgggtataatcagggaggttttcagcaaaaacctcagtttaacaacttccagggaagttactaggcacctccaggtgctaattctgcatcttcttcaggagacaatgagatgaagctcatgatgcagcaaattcttgagggacagaaaaagaatgctgcagatattaatgtcaaggttgataacatgtacagtgatcttcatgggaaattcgagtcactagcttcacatgttaagacacttgaacatcaagtagcttagacagcttctacttctacaagaccaatgggagttcttcctggaaagcctatcacgaacccgaaagactacaacaatggtaaggattatgttaatgctatctcactgagaagtggcaaagagctcaacccaatcctgaagaaggaaaaggttaaggccatttctgatgactcgggaaaggatgatgttgagaagaagatggatgatgaaccattagttgagaaagttgaagttgagaaaaaagtccctgagaaggagcaggatgagaccgttgtaccaccaccttatgtgccaaagctgccatttcccggccgtcagaggaaaattcagagagaaaaggagtatgctttgtttgatgagattatgaggcagctccaggttatgcttccttttcttgagttagttcagaatgtttctatttaccggaaacatttgaaggacaatttgactaacaaaaggacccttgaagaaggagctgtgttgatcagtcatgaatgtagcgctattctccagaatgtctatctttagtgacatgattaaggattttatggttgatttttctgtgcatggctcgtctttcgctacttgtttgtctaacttgtccagggtacttcggcgctgcgaggacaaacacttggtcttgaactgggagaaatgtcatttcatggtgagggatggtattgtgctcgggtacaagatttcagaaaagggtattgaggttgacagtgctaagattgatgtgatgatgagtatgcagtcgccaaattcagtgaaaggaatcaggagcttgttgggacacgcgggtttctacaagaggttcattaaagatttttccaagatcgttagaccactcactcagttgctgtgcaaggaacagaagtttgagtttgatgacagctgtttacaggcattcaatataatcaaggaatctctggtgagtgctcccattgtgcaaccaccagattgggaactgccttttgaggtgatgtgcgatgctagtgactatgctgtgggtgctgttttgagacaaaggaaagataaaaagttgcatgcaatttactatgctagtcgcactcttgatggagcacaagtgaattatgcaacaacagagaaggaacttcttgttattgtgtttgcttttgagaagtttagatcctatttggttaggtctaaggtcattgttcacaccgaccatgccactttgagatacttgttgtctaagaaagatgccaagccgaggctgttgagatggatacttttgctgcaggactttgacttggaaattaaagacaagaaaggtattgagaatggggtggctgataatttgtctcggttgagagttgaagaggaagttcccatgagagatactctgccaggtgagaaccttgcctcgattgaagattgctacatggatgaggtggagaggttacgagtgagcactctagagcttatgacattacacactggagatagtaatttgccttggtatgctgatttcgcgaattacctctcttgtgaactcccacctcctgatttcaccggttactccaagaagaaatttttgaaggatgtgcagcgctattactgggatgagccttatttatataagaagtgtgctgacaaccttttcaggagatgtattccagagagtgaagtcgaaggtatcctctacagttgccatgcttcaggttatgcaggacatttcgcctcattcaagactgccacaaaagttctaaatctggtttttggtggcctattctttttaaggatgctcatagatttgttgcgaagtgtgatgcttgccagcgcaaggggggtataagcaaaaggaatgagatgccttaaaactttattatggaagtagaggtctttgatgtgtggggaattgacttcatgggaccattcccatcttcatatggaaatgaatacatattggttgctgtagattacgtctctaagtgggttgaggctatagcatgtcgcaagaatgatgctgtggttgtactcaagttgtttaagaaaatcatcttcccaaggtttggagtaccaagagtggtgatcagtgatgggggaagacacttcatcaataaagtttttgcgaacttgttggcgaagcacggtgtcaaccataaggtagcgacaccttatcatccccaaacatgcggacaggttgagatttctaacagagagattaagggaatcttggagaaaactgttggtaaatctagaaaggattgggctgcaaaactagatgatgctctttggacatacagaaccgcctacaagactccaattggaaccacaccattcaaccttatctacgggaagtcttgtcacctaccagttgagttggagtataaggcactatgggctacaaagttgatgaacttcgacatcaagccagcagcagaacgacgtctggttcaactcaatgagttagatgagatccatttgaatgcttatgagagttcccgaatctacaaagagagaaccaaagccattcatgacaagaagatcatcttgaggcagttcacggaaggtgataaggtactcctattcaactcaaggctcaagatttttcctggaaaactccgttcaaagtggtcaggccctttcgtcataaaggaaatgcgtccaaacggatcagcagtactttgggataacaatggagaaccgttttctaccaatggacaaaggctgaaaccataccttgctcattccactcccgaagagggcacggcagtccctctaacggatccagaccaagcctaatcagttcattacggtcaagctaacgaccttaaacaagcgcttcgtgggaggcaacccacatggtattgtacatactttttattctttcttttattttcctttgattttggtttgtttcgctccgctgtggagtttagacttatcggctcagctgttgagtcgataagtctttgtatttaacggggttgtgagtatgtttttagtgcacaaacccgccaggagtggatcgatcaatccacaggctggatcgatcgatctgaagctgacgtcgaatcgagaaaaaacccgcaggaatgggatcgatcgatcccctcctcggatcgatcgatccctgggtggtccaaaccggcgaatttttttgaaccgaaattgaaccggtcttcactcaaatcgaaccggacgccgaacacaaaaaccagggatcgaattccccttccccattcacgacatccacttcatcttcttcatttttttggtttctcaagaacaccaaaaatccctaaactcatctctttcattttttggtcgtttttgacaaaattggtgtctatttcactcggatttttgccctctttccatatttattgtctgttttctcaatctgcaaaggtatgagctcgaaattcctcttttaggttccgtttttcaaaggtgaaaaatctcaaattccttgaatttcatgatgcttatgagttatttgatgctagattcttgtctaagatagtttggagaacctatttgtgcctttaattgctgggttaaggcttaatttgaaatttgaaaattttcccttagtaaaaaaaacggactttttcttcatttttgaaaaaaaaaaggataaaacgagtttgaaagcttgacacttgattattcatgatgcattgttagttttagtaactaaagtacaatggttaagcttttgacttgtttttgagtgatttcttgactttactttgtttcttttgatagatatgggacgcgctaaagccgctgcaggcactagagcacgcatgagcaataccgaggcaccaacaaacgatgatcctaataaacgtcctatcacaggcacttgggatggcatggacacaaagatgctagtagacttaaagcatatcgatgtgaaggagttcattgccacatgtcgactcacttacacggatcctgagaacccgaaaccaagtcaaggaaaactcacattcattcttaacaggaagcactacagcaagacactgtttgagatatgcgacatgtatggatttacaaaaggagaagcggttgagttccctaaattgtcttctgaggttgctgatgacttttggaacacgatagctacaagaccatatcagtcgcgcaaagcgaagatatccatattaggagtccggttgtgcgttatgttgcgaaagtcctcggtagcgttttgcacttcaagccagtgattgcagctgtgacagagaccgagttaccactacttttctacggagtcaaacatctactacccgcgtactcagatcttccagctcccgacactaatgtagctgcagttttgtgtgacaccttggtgaagatgaagaatactgttctacatcagccgggcagagcatcttcgctggtaccgcccttaccccattgttcaggggttgcaatttcgacctctctaagaccgaaacaatttgtcccccaacggtagcggaaatggatttgcagtacctgattcgcactaatttcaccaagccagatagtcaattataccaatttttgggtagagacggggttacttattattgcaggatacccaaccagcacattacctcatttctctccgcgacgaatctagcgttcgaaccggacgcgcagtaccttgttcgtaacccttccggagctgtcactagacgacgccagactgcagcggcccagcctacagctgaccatgttgtcggtaatgatgacgatcatgaggattatgctgatcaggcaccttccacgcacgcccagccatacttgctgctacctgaggatccagcaccataccttgtttcatcaccaccagcgggtgacgatatctcccagcagatggcatggatgatcgaatcgacaaggaagaacaacagtatgatgcacaggatgtgtagagccattttaaagatcaggccttgtgtttgcactcgcggaggaggagtggatgatggagaccgtgaacaccggtccaaggctactgaggatcgacatgctgagaggttggtccctgctgctggagcgtccacctcgcagacaccaccagagcagtccctaggccatcggttaggcaggagcaggaggcagccaggagagcagagctctagcgagagccccacccaccaccgttgagtagcgctgtaactcacacttttcccctttttattcatctttattttgatttttatcgtatctatgtggcacctttcctttgaactgttttcacaccgagtcggtgtgaagcaagtcggggggaggttgtcatttgtctactaatctattcttttgtattgttttgctttttcttgagtcagtttgttttatcgagtcaaaatcgtgtcttttattgagtcaaaatgttgttttgagaactgtgatcttttcgaagagaattgcaccatgcttgatttgattgccttgggaccattttagcactatttgataacttggaaggtcaggaaaatccatcattagatcgcttaataataatccctatctccttgaaatttggatgaattgagctttctcttatctatttgaacttaatctggacttagtttatctcacttaggggcttgagaatcatgtaatggatcatacattcagagttttctttgcatcattttagcactctttgctaactctgaatggctagactcatttttagtctagtaccacacctgttcccccacccattgtttgaaacctcaaacattcttatatgatcattatgatatgcatccatgtgcgaaaactacggagtatacggaccgacatagctttccttctgttaggatagtgagttgttgtttactggttgttcatatgtgataatatttagccactatggttttgaggttgtacatttgttatattcatgggtatgtgatgctacattggttgagttttcctgatgcagatttttgtgagacaccggttccactcccccgctattcaaaaaaaaaaaaaaaaacaaaaaaaaaatgatactaaaaaaaaaagagagaaaaagagggaaaggagatcaaggaaccggaaacgtcgagattatattggttatattgttaagcatcataggaactcattgaatagattgggatagtgtgttggttggtttgatctgaacttaagggaagctatgtaccacctaattggtctgtgtctcactgtgccaaatgaagttcagacccgccaggaagggatcgatcgatcccaggaggggattctttatctgattgaattctttgtttactctactgttgtttactcaattaccctatcctcgggaattctttatctgattgaattctttatttactctactgttgtttactgcatcttgtcatctgttgcttagtttctacaattctttactgttactcgacctgatactcgactacccagttgtctggcaagagactgtacagtcgagtatccctgttatactttttgtctgttactcgacctgtcactcgacctcactcagtgctctgtaaagagctgtgttggtcgagtgttttattgtttctgcttgaatttctgttttttgcatgttcacttagaactgctagaacacaccaaaacctgttattgcttggcttgacttagtgacttctgatcacatcttgattgttagcatcacacccatttggattgacaacctaaaatactacaacgatatgatagtgctttaggtttaatggactaaaaacctattatcaatttggcgccgttgccaattgggtgtttgtttgttacatttaagatttcagatttacttagattaagttctatttcaatttttacttcagttactaactttgtgtttgattcagaatggttgatgatcaagatgaccagaatctacccacaaacattggtgctgaagatgcaccaaggaatcaccatcaaaggaaagggagtgtaccttcagctatccagaacaacaatttcgagattaggagtggtctcatctcgatgattcagggtaacaaattccatggtctgccaatggaggatccactcaaccaccttgatgaatttgataggctctgcaacctaacaaaaatcaatggtgtcagtgaagacggattcaagctccgtttgttcccattctccttgggcgacaaagcacacatctgggagaagaatctgccccatgactcaatcaccacctgggatgattgcaagactgagaaatgagatctctggctttttacagaaggctggtgaaaggttctgtgaagcatgggagcgtttcaagggttacaccaaccaatgccctcatcatggcttcactaaaccctctctgctcaacactctttacagaggagtcctaccacgcatcagaatgcttctggataccgccagcaatgaaaatttccagaacaaagatgttgaagaaggctgggaatgggttgagaaccttgctcaatcagatggcaattacaacgaggactgcgataggactgtcagaggcacagctgactctaatgacaaatacaggaaggagatcaaagcgctgaatgacaagctggacatgattctcattagccagcagaagcatgtgcacttccttgttgatggcgagcagtatcaagtccaagatggggagggtaaccagttggaagaagtcagctacatcaacaacaaccagagtggctacaaagggtataacaacttcaaaaccaacaaccccaacctctcctaccgcagcaccaacgttgctaatcctcaggatcaagtatatcctccacaacaacaacaaggtcagaacaaaccttttgttccctacaatcaaggttttgttcccaagcagcaatttcagggaaactaccagcaacaaccaccacctggatttgcacctcagcaaaaccaaggtcctgctgctcctgatgttgaaatgaaacagatggtacaacaactgctacatggacaagcatctagctccatggaaattgctaagaagttatccgaattgcaccacaagctggactgcagctacaatgacctgaatgcaaaagtggaggcgttgaattctaaagtcagatacttagaaggacaatccgcatctacctctgctcccaaagttacgggacttccagggaagtcaattcagaatcccaaggagtatgctaatgttcatgctatcaacataaggagtggaagtgagttgtccactgttagtcactgaggacagtgcataccaagatggggaggatttcagtctcaataaagatcaaactgacaaacaactcgagcagccactcgaccagtcactcgagcagtcactcgaccagtcactcgagcagccactcgacctgtcactggagcttccactcgaccacttcactcgaccgaccttcccagcaacatcaccaactgctccgaaacatgttgctgtcaaaaacaaagaaaaagtcttcattcctcatccttacaagcccccacttccatttcctggtcgacataagaaagagttagaagataagtacagagctatgtttgccaagaacatcaaggaaatcgaattaaggatacctcttgctgatgctctaacgcgtatcccggattcccaaaagttcctcaaagactttatcatggagagaatgcaagaggttcaaaaaacaacagttctaagccatgccatcatacaggagaacgatgtcccagaaaatctaggagaccctggttcattcactctaccatgctccctaggttcattgactttcagtaaatgcctttgtaacctaggagcatcagtaaatctcatgccactctcagtagctaagaggttgggtttcaacaagtataaatactgcaatatctccttgatcttggctgataggtctgttagactacctcatgggttaatagaagatttgcctatcaagattggaaatgtggaggtgccacagacttcgtagtgctaaacatggatgaagaaccaaaaaatcccttgatattaggaaggccttttttggctacagctggagcaatcatagatgttaagcaaggaaagattgatcttaatctagggaagaatttggaaatgaagtttgatatcaatgatgctatgaagaagccgacaatagaagaacaaaccttcttagttaaggaagtggaacagttagctggtgaactgctagtagaacttgaagaagcaaataattcaaaaactgtttttaccaagagtggtaaaggtgggtatctccctagtgaaactttgagttctgagaagtcattagactcacacaaggcagcagttggctcagagatttacaagggcttgatggggtctgacacaaaggttatgaaagctaatgaagtaagttcaacacatgctcgaccaactaattccaccaacaactcgaataagcctccaacttgtccggaaaactcatgctcgaccaaacaactcaaggcaagcactcagatgtcagatgattggttagaactcaaggagagatctaaatggcaagacaaagacaaacaagagctaacacatattgtgaaagagctaaaggatcaaatcaaggagctcaatggaaaagccaaccaagtaccactcaacatcaaggacgcccctgacgatggagccactatacttgtcaacaaagaaagatgtgaattcacgttggaatgctctagaggagaagactatcttgataaaaaaaagaagcttactgtgaggacatggccactgagtacccaattgcagacctgtcaagaaaccctaatgagtatgatcactctactaaagaaggagaggagacctcatttcctctttacaacccaccctaagcctaatgagtatgagaagtcaagcttagagacttaaaacaagctcacttgggagcaaatcccatgtctatctttgtacatatctttatttttccttgttgtttttgatgcagttggttagtgttttcaggagataagtataaagagctgactaaagtggattctggctttgagagtacaacactatactcgaccacagagcaatgaaggatactcgaccatgttttagtttatccacgccaggagatcactcgactgcggtgctggccgcagtagaagaatggaggtcctgttaactcatggcggtgctggccgccatagaggcactaaggtcgagaacccacatgttggagctgaaacagaacagggtggctcgtctatggcctgggagcaatcacaggcagccattgacgaccaacttcgttcattcttcgactgaggtaagcgcctcacttcaccattgtattatatcatctcttgtgatttgttcttcattttgtttctgtgattggatttgtcctgagtactctcttccatgtttattcacacagtggactgtgtgatttaagtttgggggtgggctcaggaagtgtgtgttgcattgtgtatatttttgagtctgcattcatctaaggcatagaaaaaccaaaaaaatttgaaaaatttcagaaaatgatttcttaaaaaaagagtgttcttgtagttgcattacatttaggatcgagtcttgagtgtttcatttaggattgttgcatatgcataggggatgatgatgagatagccttgtaagcattttggttcaccggataaactcagtgccctcgttgctagttgtctgttgcatagtcaatgaatttgaaataaaactgaaccatgcctagattgctctacccgaccacactctcatgatctgataccattccctatcaatttgaacctgaatctgatctttaattatcatgtctgcatcaaattgaactcatggataccctaaaatacttggattttcttattcattttgatcactcttgttaatccaagtagctgacttcccttattagagcagttaacccaaacccaaacctagactttctttcaagccctatatcacttgtgagtgtttgtgaggtcttattccgattaagcttggtagaaagtgttaggttcgtaacgacagagatagtgtctcatgtagttttagttcgcatttttcggactagataggactaggtgggcgcttatactttgggttgggatgtgtttaaaagaaaaaaggggttgattcgttgataagaaaaggtaaaagactttaggtgaagtaagctaaagaagcagaaaaagtctagtaaaggttttgggatatggaaagaaaagaaagagttcttgttagctattgaagatgggcaaaagcccttggttttaaaatgttaaaaacaggaaccttagttgttaaagaaatccaaatccgctagatgtatcaaagtgttgagaaagcttctcctacagttaagagaaaataaaagaatgattagaaaaagggcttaaaagattcatgaatgcaaagggtagagttaagttcttatattggaattggagatgggattgccattagagcttcatttgatgtactctgggtagatggaatcttatctctgtatgcatagcttgggacttacctttagcattctactaaagcttaatcattttttgagagatcccctgttactgaagcttattctgtaagggaccgtctttgtctctcgaccttttaccttagccaaatgagttcattgatgatacattgcttgattcacgttccagaactaatgaatgtaaagggattggtagattgaaaacttgtgtaggtcgagcatatgagtcggattgattgatgataaggcatggctaacgtttttaagtagaattcgatcttgcagcttagaaccttcaacttggacattgatttcatctggtttatctggtgctttggctctgagtccccgctttcaaacctcacctccagcttgttcttgattgtttgcttgagggcaagcaaagactaagtttgggggagttgataagttgtattttgcatgttttgagcatccatttttcatcactttagcatcatatcatcactgttatataccatttctcatcatttgtcatcactttgcatgtttaggatagatttgcatgcatgttgcatatttgcgttgattttaggtgatttggagctgttgacgagctgtctggaagaagcgggcttgatcatgtcaaaccactcgacctcgaggtcgagtaggagcttcaagatctcaacagatcactcgaccccctggtcgagtagaggacatcactacttcaccacatcactcgaccccgaggtcgagtgtcttcatcccatcacctgaccatcactcggtctcatcactcgaacacgaggccgagtgtcttcaccttcattgccagaccactactcgacctcttcactctacttggaagtcgagtatcaccatcaccaccactcgactgcatactcggtgacaagcttcagagccttcttcattccgcactcaaccatacactcgagcacaaggaagaaaagaagactccagatattcactcgacctcccactcgaccacatgggtcgagtacagttcttaatccgccgcaatacttcgtcgttttaagtattagggttttagaatatttggctataagtagcatgtacttcacattttcgcaaacaagtttttatctagttttattctgcagaccttgtgttctagaccttttgtaatcctgatttctctttatctattcagtattcagtattcagcttttgttcttgatttcgtttactgttgttcattctgttataatcctgctgttacactgttgttatcatgtttttaacttgtttaacgtttatgctttctgttatgatgtctgagtagtgaataggtttctgaggatgggttagagtagtgtaggattctcagtatgctaggtgattgagtattgattgatagatctcttctggattagttgttcttaatgcgtattgctttctgatcaactggaatttgagcccagacatttccgtgcccaaaaggtgttcgatgaaatgtctgaaccactaattccagagatttgtgaccctgtaccaaggtattggttgcagggagcgttttggctttaacttgttgattcgtaatgcctgttaggttagctctcgtcaatggtgattgagtgtgggactaggttaacttgagagtctctgttgcggtggcacttagatttggttaataaacttgttgtctagggttaatttattgaccatgtcaaccacgtgtaaactgaggaaacgaaactactcaattaccccatcctcgggaattctttatctgattgaattatttgtttactctactgttgtttactgcatcttgtcatctgttgcttagtttctacaattctttactgttactcgaccacttagttgtctggcaagagactgtgcagtcgagtatccctgttatactttctgtctgttactcgacctgtcactcgacctcacccagtgctctgcaaagagctgtgttggttgagtgttttattgtttctgcttgaatttctgttttctgcatgttcacttagaactgctagaacacaccaaaacctgttattgcttggcttgacttagtgtcttctgatcacatcttgattgttagcatcacacccattctgattgaaaacctaaaatactacaacgatatgatagtgctttaggtttaattgactaaaaacctattatcactccgagtgatcaattggtcaagtagatgcttcttcctctcttatctgtatgctcagatgtctggttgagtggggaatgaggaggatccgaagatgctttgatagatcaacaagtcttgtagagttggtcgcccttggtcgagtaaatgggtcgagtagaggatcgagtaggaagggcgagtagatcgatatgcttcttcttctaaggctgccttgatcgagtaagtgggtcgagtgaattgttgcctcctctgtggctacctagatcgagtgaactggtcgagtagaatgctctgctgcttccgtgctggttggatatagtagagggtcgactagaatccttgtgagctccttttgcacctgaaaacacaccgaaacatgcaatatgtatgcaagatgatcctaaatgcctaactgtgcaaagaagctaaatgtgatgcaaaatgatataaaacaatgagtgatcactaagctaaatgatgataaatacatgcctaaaatgagtaatttacagtgttatcggcagacgacgtggtgtctccttcattagagcggacaatgcgctgaaagcgcaacatttgatcaatcaggttcggaagcactaatcggagagtagaggaggggttcgcaacagcattcgaacacgccagatctcatcaaagatgagtttgccaaagttgaaaggtagagctttggccaccatgtaaagaagagtgaccctctccggttttagaataaatcgattcactttgggcatccagttgtgacaacagatcttgttgagctgagtgatctcaagagaaaacagccaagatgtgagcatcttctaagagttggctttgcagtttgacagagtaacaacaatttcatccatggactcaggaacttgaatctcagacatgttcactagatatgatagattaggaaaatgaaacatttgattggtaatagccagggagaactcatacatgttgcctctaacgaacacggagtaagcaagttgatcaccttcttcaccaccggggaggtttgcatagaactccatgacaacctcttgcacataagagttgatctctgtaacagtagggagcagaccaacagtggagaggagttgtagagtactcgcaatgttgtttccatcaagaggaagaaaacgcatgtcgttgaatcatcgacccccgatgaccttgtagcgcccaagtccttctccagtaagaaagcagttactgtaaggagtctctgacggaaatttcagctcagggtacttacggtcacgagcagagagaagccgatggttctcttgataccgggatagaaagggaggcggaacaatctcggtaacatcaccatcttgcagatctgaagtctcaaggaaattttcttcggtctgtccagcagcagatgcagatcggttggacttcctgctagacaaccgttagagagcaggagcaggcgctttagatctggtctttgaagtagcatcagtatattgtgtctttcgctgaaacgctgtagagaccttggacttggttttcttggacatgcagatgcctggttcagtcttgggaatgaacatcagaacagatggaggcgatgcagggtcagaaggagtcgcagcggaaggctgaccagcaccagagactccagtcaacgaggtcgcttcttgattcatggtgacttcgactttatagagaaaatgaccctttgaattatgaggtttgagcagccaaaaaagcgaatgatacttctatgggagctgctttgattaaatagcacgaacacttcaagtgaaaccctaaaaacaatacgaaaaccaagccagactgcaaaacactaaattagatccgtcaaacattcacagggccttataccaggcccaaaaccaacaacaaaagatccagacacataacaaatacccaactatgtacaaacgacaattgcaacattaatctaaggctgaccatatataaccacaaattcacccaaatcaacacttgaatattaacaaccactgtcattcaagaactgtgattcaaactgaatgtgaaatctcatcaagtcatcctttaaaacaaaaacacaaattaccaaaaactatctatatatatatatatatggtacaaaagcgtttgaggatacttctaaggaagtcaaggagcctacctatgcatttcatcaaagcgagagggtcagattccaaagtacagagttgcatagcttacttttagtatggagaaataacagcttcctagtccagtgagatgaaccatacacactgatcatagcaggttagtctacactcgtcatactctcgatcgaagtaacctcatgatgtgtgtggtcaaaacggcaagggggattggtagagcctataatgaacaaagatgttttgagggggtactcatagatacatatatgccccaaagataagaaagaataccaatccctttcctgccaacacacattttcctgttttttttgttatttcgttttttcttttgaactttcatttgttcaatcttttgggcttttcttttttcctctctttttttctttcatttttttttattacagaccacacacaatatttttggaaacttcattgaggaagagcatgaagagcacctattttcctgaaatgaagtgccagaaagacagacacgatagatatttacacatacgaaaacacaaagctgctgcaactctgtacaaaggaacctgttgcaatagctttaacaccaagacacattagtattcactcagaccaataaattttatcagattcaagaaactgttcaaatccaatggtttaataaatatatcagctaattgtttttcagaggaaacatgagagatctcaacaatcttgttttcaacaagctcatgaatgaaatggtgtctaatgtcaatgtgcttcgtacgagagtgttgaataggattctcagatatgttaattgaactcatattatcacagtacacaagcagggtgttagatgtcatactttagtcaagaagcatctatttcatccatagcaactgagtgcaacatctcccaagagcaatttactcagcttctacagtggacagagatacacagctttgtttcttgctatgccatgagactatgttgtttcccaaaaagaaacaccctcctgttatacttcttcgatcatccagatttcctgtccaatcaacatcacagaatccaacaagattttggttagtttgtttagaataaaagaatccaacatcagttgtacctttcacatatttgagaatccatttcacagcattcagatttgactgctttggattagcttgatatgtggcacacacacccacactgaaacacagatcatgcctacttgctgtcaagtacagaagactgccaatcatcccacgatacaatttctcatcaacactcataccagcttcatctacagacagttaagcagtagcactcatgggagtttttgaggtctttgcagtctgtattccaaatctctgaattaaccccttggcatatgtagactgagagatatgaactccttcatcattctgtttgatctgtagaccaagaaagtatttcatctctccaaccatactcatctcaaactctttggtcatggattcaacaaagtaagtgacaagcttttgttttgtgcttccaaacacaatatcatccaaataaatttccacaatgaggatgtctttttcatctacaaagatgaacagagttttgtccacacttccacatttgaacccttttctattaggaacaaagtgagatgctcataccaatgccctaggtgcttgcttcaatccataaagagcctttttaagcttgtaaacatgatctggaaaagcagaatcttcaaatcctttaggttgagacacaaacacttcttcctaaataactccattcagaaaagcactcttgacatccatctgaaacaatttaattttcagcaagctcgagattccaagaagtaggcggatagattcctgttttggaattcctctaacaacttcagcattcacaatcttgactaagctctgagtattcatgtgtccaagtcgttgatgccacagatctagcttggatgtgattggagacaaacagatttcataatctttccacatatagtagttgttgcctgaacgaactccagatagaacattggttccaggaatatcaagtgcaacacatacagtctttgtaaacgtaacagttaagtcatcatcacacacttgactgatgcttatcagattaccagtgggtccctcaacaaaatacacatttgatacgtgcggttgatcatctatctcgatcttccctttcactttaatgcttccttttccaccatctccaaaggtgaccttcccattggtgatgacagtaaaataatttagaacaaattgttcactagtcatgtgacgagaacacccgatgtcgaagtaccatgcgttgttgtcttgagaaacaggtgaagtataagccaccttagcttgtggagtgcaatcatccaactcaacaagattccagttgcaaaccagatttgccacgtcttgcatttctttgttgacgtagttacagcaactagagtaatgcttttcctcttcttcgtacatcctttataacttgtgattgtacctttcagctttcatatcaccatacatatctttcttcttaatccacacagtacagaatcttgatggctcaatgtagcactttgctaaattccacaacgttctgactttctctttgaatttgtaacactgttctctcatatgatatctcttaccacagtgatcacatcaaatcacacccaccatccttgttctcacaagagattcttttttttcctcaacattctgccttacttgttttttttgttctgtatagctttgtctcaccacgggttcgcttgttgtaccaccactaacaaagttgatgattcttccttcttccttgttgatctttcctgtataaccttgataacctaaacccctctattgccaagatcttgtctagactttctaaccatttgtttagcattctgatctgtttgtgtttgtcattcaactctctttccacaagtttagctctatttctttccatgtgacactcttcctgaagacgctcaagtttcttttgatagtagtccggtgaagttccaacaacagtgatctcactcagattttgcttatcctctgtgctcacattagcaacttttgcttcaagagttagcttttcctttaccaattccagtttctccttacttagttgcacccagttgtcatacaacactctgtattcatccttgggattcagttcctcatcgcagtcagaatccgtgtcactcataaccttactggagtcagaactcgccatgaacgccacaaaatttaaaagctcttcaccttcatcatcagattctgaatcactaaaacttataagtgatttctctttcagttttctcttgttgggacattcaaacttagtgtgacccacacctttgcattcaaaacatttcatttcttttctcttggtgactagacactccggtttaatgtgaccaaaaccaccacactcatagtattgaatttccgtcttctttcatgagtcatcattctctgatttggagaatcttccacgtgatctctctccatctttattactccaagatgtattgtcacgattctgacctctttccacacgttttagggctttcccaaaattctttgctaaaagtgccaatccatccttaatctcctgaaactgcttagagccttgatctgcattaaatgcaatattgttcgaaggtttaactttgtcttgatcagcttccatttcttctgacttgagcattcccactagatcaacaaataatattttatcattgttccctacaaccctcataattgctttgtgggcagcaaactttgatggcagacaacataaaagcttcttaaccaatttttgatctttataggtcgttcccatgacctcagcctcattagcaagagcacttatctttgaactgaacttcatattgtttcatctggttccatcttgagatactcaaactgattagcaatgtgatccagtcttgttctctttacactcgaaaatccctcatgagatttttgtagagtatcccatgcttgtttcgctgacttgaacccttgaatgagcttaaactcatctttatcaacaccattgaagatagcgctcatagcccttgcattaaactttgacagattcttctcttctacagtccaaatcgcctttggtttggtgattttgaacccatcttaagttagatcaaacggaggttcccatccttcctctactgcagtacatgcatctttaccttgacctctaatgagttgtgtcatacaaactttccagtatccataccgcttagtattcagcaagaataccttgcttgtacgagtactaggatatactaatctcagattggttacccactctgataccaattgaagtaatagaaccctaagtactttgactagaataagaacacaactccaataaacacactttattagaacaaccttcaaactaatcaatcacagataagtttccacaatgttacgcaacatcaacaacctgatttgctcttgtaagatcctaaaactacccagctcacaaacacagcaacagacgtgtactctctttattcactcaccaataaaacccacgagacaagttcttcttaacttttctaatcttccacttttcacaagtaaagtggcgaaccctaataagagaccaaagcttctcttatatcttgtcttcaaaaatggaggatgcttcactttatccaacaggtccaagtatagctcctcatcattatctagacactaggcccatgtcctatgcctgatgatataccttgattttcactgcttttatctatgatttaggtatagtttttagagtccttttgttatttgtagagtcttttctactctttttcaggtctttacatgtttgggatgcatttggagattatggagcattctggagcaaaacagacaacttaagctgcggcagcaatttggagacagaaattgacgtaggtgtcgatcgacaaaacccctggtgtcgagcgacaccaatacctgacggtaattcaattacacaacttattcgtgttttgaagatttctaaattcggcccagaactttctcttattttcaaagaaggcccagacgtttttaggacttatatattgatttttatggtcattgtttctcattgtttagacctaactcttattatctcttttattcttgggagcaaaaccctgtagagactctttttagagaagattcttctaaactcttttctcttcttaattcattattgatttcttattcaatcatgttttgttcttctatgatcatgcttgagcagttctcttgttaggtttaggaattctcattagggatttggatgaattagtagatctaaaaccctgttaggataatatatttagaattcttcatcttatattgttcttaatgcttgttctagagtaattaactagaacctgattttaggttaataggtatgcccaccataggtatctattactggatctatcttagatgagcctagtacttaggtgaacttatcaaacctgattataatgcttgcttagttctagggatttacaagagagttgggatcaatactattaagcacagtgagtttcgcggaacgccactggttactttatattagtgatttgtgttctataatggttcgataatatttctaatttattgctagatctactattctgatatttcccgagcatttccctagacccaacatcttaattatctgaatctaaaacaaacttttaattgctgtcttgtcttttacttttataatattttatgtttagctttattcgaaacagttagtctattgtgtgatccgagaactttgtagaattcgatccctaagtgctataacaacctctttatttgagagagtagtcattagggtaatttgactcatatcacctgacaaatttgtctcttttgtctaaagtgatatgtcttttcttcactccaaccaacatgctacgctggcaaaagcaactgttactttcccgcttcctctgttttggtctgtattgcttcagacatgcctgttgaacttcagacactctgtttcttcaataacagcttctttcaaacttctgatccttcatgaatgcatcaaacctctgattccaaagtctaggagactgttttaggccatatagggacttcctcaacaatcaaactttattttcgtttccctcttgtatgaatccttcaggctgactcattaggatcctttcctctagattaccatgcagaaaagatgttttaacgtccatttgctccagctcataatccatgttcaccacaagtgacaacattaacctgatggagacatgcttcaccactagagaaaacacttcattataatcaataccttcttgctgcgaaaaacctttagcaacaagcctgaccttgtatctctgtttctccaatcctggtatgcctggttttagtttaaaaatccacttgcatccaataagcttctgcttttctggtttctcaattaaatcccaagtgtgactcttttgatgagaatccatctcctctttcattgcactttcccactgctttctcttactacgtttcatagcttcttcataagacttaggctcttctatttccaagtcttcttctgttgccaatgcataagctacaaaatctccgtctttaaatctggaaggaggccttatattacttcttcgtttcctctccctcgctaataagtaatcatcaagagactgctcattttcagatccatcaacttcctcattcgtttctgattcctctaagttttctgaactttctgatgaagatgaggaggtttctccaccttgagaagatgagtcttccaaatcatagtagctagttgaaggacctctaagaagatcatggctgaacgacactctttttccagctttcttcaattttctgtactctttttcagcttactccgtccttccatctggactacttagtgtgcccttgtacaattcaatttcattgaacaccacatttctacttgtagtgcatttcccttcttccggtaaccagactctatatcctttgataccaaaaggatatcccatgaaaactcctttgactgctctcggacttgtcttgtcttgagtaacatggacataggctgaacattcaaatcttctgagatgacttaaatctggttttgtacctgcccacacttcctcaggtaacttgaaaccaaatagacgagttcggtgtcctgttgattaagtagactaccgtagaagtagcctcaacccaaaactcttgagtcactcctgtctcagcaagcatacttctaaatttatccataatggtcctattcatcctctccgatacaccgatttgctacggtgtataggtgcacgttctgtgcctttgaattccagcttccttacacaagttgtcaaactgtgtattacataattcaagaccattatcaatcgttaaatacttaatcttcttgcccgtttaattcttaacggtttgtttccattctaagaacttgtgatatgcctcatccttagtcttcagaaaatacacccatactttctttgagatatcatcaatgaagctcacaaagtacctacaaccaccaagactttttggagtgatacactcctggacgtggatgtatgctccaaggactcactttgttggttttgaattggaaatgatgtacttgatgatgaataatggattgatttgaaacaaagcggcggaaagacgataaaccgggctgatgacaagatcgagtggatgcagcggaatgaaaggggaaggaattgtacttccaagagtgatgaaagactcttagactactagcttgaatccaacttagatattacacactaagaagaaaacaagttgaaaagatattacacacttttcggatcaaacaagtaaaagagaaggtttttgattaaaatgtttgatgattgcaaatgagagatacaatgagtttatataggagaggagggagaagggggggaagaggtgagagaagaaagacatgcaagagcatgcacaagtccacactcatgcaagctcatgcaaagagttttggaaataacaaaagcaataaatgcaaagtttgaatagaaaagagagaatgggccaaggcattatgagtgggccttggaccccgaattgggctgataaagggaggcttgaaagtgttacttaggcctcattaaaaaccttgtcaagaaaacccattgggacaaaacttgacaagggaaaaagagtgcataagcaacacttaaccctttaccgagcctcttgagccgtgatcactatgaatgaggattgagccacgtcttcttgattcttctttagctccttgagtagtccattgatagcttggttgaacttcttggattttgatcttgttagaggacccgccggaacgattaatgcttcctccggtacaagctgctcctcggcttcaagctgctccttgtcttcttgtggttcaagtggtttggttgcataagtcatgttctcatcatcctctcccacttgaaaaggatttgacctcaaatccaaattatctgcaaaaaaaggttgaagatcagaaacattgaaactaccattcacattatacttaccttggagatcgagtttgtaggcgttgttgttgatccgtttgagcactttgaatggtccatcgattcttggcattagcttggatgatcgctcttccggaaaacgttccttcctaagatgaacccacacttgatcgccttcgttgaagatgacttcttttcgacctttgttcgcatacttctcgtatttcttcgttcgagcctcaagattttccttagcctccttgtgaacatgttgtactaaatcggctttcttcttaccatcaagacttgatctttcactcaaaggtaaaggcattagatccaaaggagatgtgggtttgaacccataaacaatttcaaaaggagaaaacttagtcgcggaatgcatcgaatgattataagcaaattcaacatgcggcaagcaatcttcccaagtcttaaggttctttttaatgagcacacgcaataaagtagacaaggttcgatttacaacttcagtttgaccatcggtttgcggatgacaatagtagagaaaagcaacttagttcctaactttgaccacaaagttttccaaaattaactaaggaacttagtatcacgatcagaaactatggtcttaggaatgccatgcaaacgaacaacttctctaaagaacaagctagcaacatgagatgcatcatcggttttatgacatggaataaaatgcgccattttagaaaagcgatcaacaaccacaaagatggaatccttaccagtcctagtcctaggcaatcctaccacaaaatccatagatatatcattccaaggatgcaaaggaataggtaaaggggtatacaaaccgtggggttgaaccttagcttgcttacaagtcgcacatcgttcacatagtcgctcgacatctcttttcatgtgcggccaatggaagtgttcttgcattaccttgtacgtcttagcaactccaaagtgtcccattaagccacctccatgagcttcccttaaaaacaattctcgcaaagaagagtgaggcacacaaagtctattttcaaagaacaaatacccatcatgtcgataatattttccaaatgcaaacttctcacaagattgaaatattttgctaaaatcagaatcattagcatacaagtcttttatttactcaaaacccaacaatcttgtgcatccaaagaagtaagcaaaacatacctccgagataatgcgtcggctacaacattatctttaccttttttgtacttaatcacgtatggaaaggtttctatgaattcgacccaccgagcatgacgtttgttgagcttttgttgaccctttaagtgcttgagagactcgtggtcggtatgaatgacaaactctttcggccatagatagtgttgccacgtttgtagtgcgcggaccaatgcgtaaagctccttgtcgtaggtcggataattgagagtcgctcctcctaacttctcactaaagtaagcaatgggcttgtgatcctgcatcaagacagctccaatacctaacccggaggcgtcacactcaatctcaaaagttttcataaaattaggaagaattagaacgggagaattagtgagcttctctttcaaggcttggaaggcgttttcttgtgcatcttcccatttgaatccaatgtccttcttgataacttccgtaagcggggcggcaatggtgctgaaatctttgacaaatcgtcggtaaaatcccgctagaccgtgaaagctcctcacttcgctcacattcttagggctcggccattctctaattgccttgaccttttcttcatcaaccttgattccatctacacttacaacaaagcctagaaaaacaagattatccgtgcaaaaggtgcacttcttcaagttcgcataaagtttttcttttcgaagcaagtccaaaacgagtttaagatgcatgacatgatcttccaagtttttgctataaactaagatgtcatcaaaataaacaacaacaaatactccaatatgctttctaaggacatgattcatcaatctcatgaaagtgctaggtgcatttgttaacccaaacggcataactaaccattcatataatccttgtttagtttgaaagccgttttccattcatcaccttccttcatccggatttgatggtaaccacttttaagatcaatttttgaaaagatgctagaaccatgcaatttatcaagcatatcatctaatcgagggatagggtggcgatacttaaccgtgatattgttgatggctcggcaatccacgcacatgcgccaacttccatcttgctttggtactagtaagaccggaatggcacacggactcatgctttctcgaatatgacctttgtccataagctcattcacttgtctctcgagttcctgtgtttcggtcgggttggtgcgataagctggtcggtttggtagagcggctcccggaacgaagtcgatttgatgctcgattccacggatgggtggtaaacctatgggattgtcttccggaaacacgtccttatactcttgcaaaatcaactcgatcttactcggtagcaccggtatgggattagttgaacaagtaagtgtttctttgaaaacaaagagtaaactatttttacttaccttgttcttgccctttgtatcgattggttcggttggtttgatggcccgttgtttcatacttagctggtctagatagacttcgtgcggagtcatcgggatgagagttgtcttttggccattgtattcgaaggtttgtcggttggtgaagccatcatgaagaacttttcgatccgattgccatggtcatccgagaaggatgtgactagcgtccataggtagaatatcgcacatgatctcatcatgatacttcccaattgatagtggtaccttgacttgttctttgacggacatctcacccgtttcattaagccattggagcgaatacggtctcgggtgtttaagcacttctaaaccaagtttctcgaccatgttcctactcgcaacgttagtacaacttccaccatcaataattaaactacataccttatctttgaccaagcaacgtgtatgaaacaagttttccctttgcgcttgttcctcggccttagttagaacactcaacgatcttctcgcaacaagcaactctcctctaccgggggattccacatcttcttccattgagtcttcttccgcacgctcatcttcagattctacttcgccattgtctctaaggaccatgatccttttgttggaacattcgctcgcataatgcccaagtccttgacacttaaagcatcggatatctctagccctggtgattacttccttaccctttccttttggatctagatcgaccggttttggcttgacgaacggcttgtaatccttttgataagcaaacttctcttccttttgataacttggctttcccgggctgtagttggtcttggtgtgacttgatcgggcgttctttctcttgatttgctgttcgaacatgaccgctgtgtgaagcatctcctcaagctccacatagtgttgagtttctagacggtcttggatttctcggttaagacctcccatgaatcgggacatgaccgcttctccatcttcttgaagatcagctcttaacataagggtttccatttccttaaagtattcttcaacggttttgcttccttgaaccaaatttctcaaccgctgatgtatttcacgatgatagtaactcggcacaaatctctttcgcatgacggttttcagctggttccatgtttcgatcggatagtctcgggtacgtcttcggctagtgacaagttgatcccacccacttaaggcatagtcgtagaactcagtagccgcaattttaaccttgttggactcaagacattcttgacaaagaaagactaactcaattttctgctcccattccaagtaagtatccggattgttggttccatggaatgcgggaattttgagttttaggcctcccaagggatctctaggtggtggtctctctcgtcgatgcctacgttggctactgtgagaggaggcgtgactatagtaatttcttgcctcttcatcttcccttggttcttcttgtcttagacgtggatttgcgtccgggttgacttgatgtaagtttagagcaccaagcttttcatcgattaatgttgtcatagctgatgtgactgttttcaatatcctcctttccaaactagaggcagctgacgcatcatcttcttcacttgtcaccattgtacctgaaaaattaaaaatttaacaggtaaaacagtccaaaaacaggcaaataaaaacggatctgaaaaattatcaaaacgactccaaaaattcctaacttaattgctaaaaatactagactcgtaaacggttcgagtgcaattgttttcacaatttttgaacgagccaaatattttataaaattcacgcaagattgaacggagatctgaaaaaaagaaaacaaaattttagggttggaacttcaaaacctgataacaaagtggctctgataccacatgatacactcctggacgtggatgtatgctccaaggactcactttgttggttttgaattggaaatgatgtacttgatgatgaaaaatggattgatttgaaacaaagcggcggaaagacgataaaccgggatgatgacaagatcgagtggatgcagcggaatgaaaggggaacgaattgtacttccaagagtgatgaaagactcttagactactagcttgaatccaacttagatattacacactaagaagaaaacaagttgaaaagatatacacacttttcggatcaaacaagtaaaagagaaggtttttgattaaaatgtttgatgattgcaaatgagaaatacaatgagtttatataggagaggagggagaaggggaagaggtgagagaagaaagacatgcaagagcatgcacaagtccacactcatgcaagctcatgcaaagagttttggaaataacaaaagcaataaatgcaaagtttgaataaaaaagagagaatgggccaaggcattgtgagtgggccttggaccacgaattggcctgataaagggaggcttgaaagtgttacttaggcctcattaaaaaccttgtcaagaaaacccattgggacaaaacttgacaagggaaaaagagtgcataagcaacacttaaccctttaccgagcctcttgagccgtgatcactatgaatgaggattgagccacgtcttcttgattcttctttagctccttgagtagtctattgatagcttggttgaacttcttggattttgatcttgttagaggacccgccggaacgattaatgcttcctccggtacaagctgctcctcggcttcaagctgctccttgtcttcttgtggttcaagtggtttggttgcattagtcatgttctcatcatggagtataaggatatcccaagagatcagaatgtatataatctaatatacctttggtggtgtgcttagcagttgggaaactttgtttgtcagattttctaagtacacaactctcacaaagttccagcttggttacttcttttcctaataagtagccttctttaaccagcacattcatgttcttcaagctcatatgacccagcctagaatgccataatctagtcatgtcaacgtctggtcttgccactgcaaattctccatttactacatttccttctagatagtaccgcccatcttgatattttccagaaattatcttctgtccatctttgtagaaagtgactacaaagtcttttccttcatatttgcagctgctcttctccaattgaccatatgaaatgaggttccttcccattgtaggtatgtacctcacatttgttaagatgaccacataatcatctggatttaagatcttaatcttaccaatccctttcacttcacggtgagtcatattacccatcaagactttgcctccatcaaattcttgtaggccaaacggagaatccttgtttggtgtaatgtgaaaactacatccagaatccacaactgattcttcctttgtgtattgagggctagttgttaatactagtggctgttttggctccactgcaatgtttgctgaacttgaaggcttgtttgaagacttttcaggacactccctcttccaatgtccttctctacggcaaatgaaacaaccattgttgtttttattgtagtttggtcttgattttgatctgcctttgctcttagaacgtcctctccatggtttgccttttcctttgtcaaacctcttttctaatctgcctcttgtttccacatagagaccttcactttgagtttttgagagctttccactttctttgattctctttcgtttgattttgcagcttcaatgacttcattcaagcttaaagtgtctctgccatacttcaacgtctctttgagctgatcatacatgttagataatgaactcaacaatagtatagcttgaacctcttttgtcacatttactcctatgttgtttagatcagtaactagcttaaggaaatcatccacatttccatctatacttttagaatcagtcatcttataagtatagaacttaagatgtaagtagatgcgattaggtagagaagtctccatgtataacttgtttaatgtggaccacatggctgcaactgtctcacagtttttgatctttcttagtacttgatttcctacgttcagtactataagatcttttgccttctctgacttttcaaactttacaggatcaacggttggaggcaactcaaaatctcctgctataccgacgtgatagtctcttccagctactgcagcttcctcttctgtagcaggtgggtctcttagcagctgctcttcgttcaagatacctttcagccctagaaccccaaagtgagccaacattctgaccttccacaaagagaagtcaccggttccatcaaatctgtcaacctcaacccgagcgttactactcatcttgtaagtcttcttgtaacccctgatctcaaactccttagcaaccctatacaagcctagagatctgataccacttgtggagaaaagagtgatagagattgcttgttaaaaaaataaacaaacacagaaattggtaaccgagttcacggcctcaaccgctacatctcgggggagatctcttgctcccaaagctttactatatccaagggattacaaacacaccactaacttgtgatgttgtcttttggttgttacaaatttgcactcaagaaaaacaaagattcaagaacaataaagaggaagaagaaagcttgcttaggaagttttttttatctctttgcttcccgtcggttcaggcaccatttttttgaataggtgggacttcggtgataggttttagattcttttctcacctactttcattacgttatacgttgtaatgcatatataggtgatataagtgggcccacaaatttttatccacacttttgttcttctccaccttccaatttcgttgacccaataaagcccaataattgtgttatgtgaaacccaaacaacaatataggtgtctcagcctacgaaagtaaacacattgtatcaaattcggaaacaaacagaagaaaaacaaagtatggaaagtttccctcgagagaatcattattgtacctccaagaaatagagatcgtcaaggtatcttttaatgtaattgattatattctttcaggtcaagaatatttggtagacctcattctgcaatatcaatcaaggtaccgctggcgatatcgagtttcctaacacaaaataaaaaaggagtagaaactctataaattaataatacttggactatgaaattttattaatttatagtaatattaatttaatctataaatttattaatattttttttttactgcaactgaattctatttatacttgtaaatctttacaaagcaaagttgtaagcctttgttgctggtttcctgtatcagcttgaaacaaagagtccgtaaattctaagaagcaagataaattaattaatattaatttatagaatatttacgtaaaacacaatactaaattattttcaaaatattttttaatttagattttctcatatttaattgtttgtatattgaattatgttagatctttaattttatttttgactttttaatttattttcctgcaagatatattgtttctatatctacgacgttaacgtggagtttaatccaatttttctttacaaaaatcttagcaatgatttttcatagaatttttttttataaaaccaaatatgacggatcaaatatgcaaagagttatgtgagtacaaaagagatcataccaactctactctaaaaagagttgcaattgtggcttgaataaaagtttcatataaaattagtcttagaaggtatgcttaagattaatgattattaatttatgatattgttgggaccatatttttacataggggtttcaaaaaaattattatcttattatcttatcgattttcgttaatttttacattggcccgacttgggaccggcaaaatttactaatttatcgtgtttattaatttatcgagtattaatttatagagtttctactgtacatatcatatatattacggtccaaatagaaaaagactgatggaattaagtatctaaagaatattgggtacctaatctttaataatataagtatttggatttctaggctttcctgtaggcttgggagttcggagaaatcggtttattcgggtcgggctattcggttttggagaaattcggtttttgaaaaatctatccaaattcggttcgggtcggtcggtactcgggttattcggtttggttatagggcttaaaaataattccaaaattaaaccaaatgttttctatttcggttaatttaaattgaattacaaaaaaaaaaaacaaataggctgaaaacaaagcccaaacttattacaccatcaaaatacattaacaaatttacaaacccaattataaaatttacaaggcccaacccgaattcacaaggctcaacccattaaaattttagggtttttgacaagggttaacggcgacaaagagccacggcgacggtgacagacgggacgccgacggtgacaacgaacccgcgacggcgacaatgatgaccaatcttttcgtccgatgaagcttgtaatttgccaaccataagaaaatctgccaccaacaagatctattagatatcgtcatcataaatatacaatctgaattgaaaaaattagagatggaagtaagaaaattgaaaatccaacgaagatttattagatctaaagaattacaagtgaatctagccgtgagtttggtgataggaagagcttagtgagcacacaataaaaaatcagaccaagaagagattgaggggaaaaagaagagcttatccctaaaacatttgtggttataggtgtagaaagaagaagagctaacaacaattgatgaagaaaaaagaaaatcagggattaggttggagaagatgaactttgttttagtttttgaatggaaaagaagagaggcgcagagccaaagaagaaaaataaaaccaaagattagggtaaatgacattatatatggctgcagattgtcggtttagataaaaccgatcggttccaattaccgaaccaacccgaaccgaaattcgagtatccaaattaattctgccgatcgattaggaaaaagttgttcttttgacgccgataaccaaacgtttcggtttgatcgggtcggtttaaacggtttataccgaaatcccagggctactttcctggaacccagatttcagttttttgcagaggaaatgataaaactgtaaaccgatgttttctcaccaaaaacgtaaaacccgtattttctcgccaattgttcgtttttatggcaattgttttatgttgtatatttggtaatgatgacacattaaatgtgctgttgaatatatttttttgacattatggttctcgaattgtacactattgtagcgtaaacctttgctataagaaagtgatatgtagccctttggttttgctactgtgtagtatttagtagctattataaattgtaataatatcatttacaatagcatttattaattgcggtttaataatgttttagcctttttatcgtgctataatatatgatttattggcttttatattgtactatctaatatttattatgacactgagaaaatgctgtgtatatatattgcaagatatatacattaacatatattgaatctattttgcaatgaatcaaatataattgcacaaaatataattagctttaatttatgaaagacaatgaatcataaaatatcatattacataaagttaacttaacagagtcaagatattacatgaactaaagacacattaaccattaaaacatgaactcatagattcctgcggcttgactctcctctttcctctcttgggcgtttcttagcagtgttgttgtgtgcatcctttttcatgtttctgaaccattgcttgtagagtggatcaatgtcttcttcctctagttcgattcgtattaagtagccaaggtgaggacaagactgcctaaactctagctctgttatctccttcagttcatcatccacctcgttttgttaattgttatttgcctgctgttgtggctgttgtggctgttgtggctattgtctgagccttggtataacgttcttagctgggaggccgcatatgagtcctttagcttccattgaactagcggtttctgcagtaccaatgagaaagacaacaccacaaatttcaaacttcaccgaattagaatagaattaacctaagaaaagcttgaatcttaagtattgcaaatacaaactgaaactagcaacatacaagttcaaggagacagttccaattttgaagccaatgagatcatacatctcaagttctctaaattatcatctactcattactcaacctacgaacagcttcaatactaactcgaaaagaatacatatgcagtatgagtcaggatccatcgtggactaacctcaagaatcaaacaagtttctattgacaggctataaccagtgctttgttctgtagtaacagaacacaactatcaaagtcaactaatcattttcgtttctatggctcaacttccacaatcaaacagagactatattacagagatattgacagtgctaatgcattgaagctctcctaaagttaacataaccaaatcgatttccaataaacaaagtgaggaatatcaacaattcatgcttatcatgcttcaatatcacataatccatagctaaaaaaaagtgtctacaatagaaaaaatgttaacttacagtgattcttcctttaatcctcaaatctgtcttctcgaacagccaaatctggatccaaagaccatcgaactcatcagataaggaactaacaaaaccagcgaacacatcaaaaacctcagagaaaacaattaccttttctgggcgaaagtaaatcagaagaagttgaggaactcaaaggtttgtagattcaaccttttcgcttcggagagagatgaaagaagctttgattttttgggtttccatcgacgacatcgaataaagagaaataagaaagtaattaaaacaactttgattattgacccttagatgtattctaatcaacggttgatatgaatagttaggtgatccacacattaatcaattagccaatgagttaattgtcctcttaataattcgtgacccttcgatatactaatcaacggttgatatcaataataaggtgatccacaccttaatctattatccaatgagataatttttttacgattattatgttaatagcctaatattaagttatttttctttgtattaattttttgatatggtgttaaaattaaacttaaaactaaagtttcatttttttagagttcttaaaaataaaaattatattatccttaataatcaaagttataccctaaattgactaaacatgtaagattagtgactaaatgtaatattgtattttttccaatacattaataagtatatttttatctatgaaatgaatatgcataaattttaattatcatataacttttacattattaatttcatgtttcatgtattagtgtagaatgctttcaactaagagatattagtatagggtataggatttagggtatagggtttagggtttagggtttctatcttatattattatatgatagtaaatttaaattgttataagtttgacattgttaatttcatgtttcttatgttagtgttgaatgctttcaactaagagatataagtatagggtatagatagggtttagggtttagggtatatgatttttttttttttttgtatcatcaatttttatatattttcacaattaatctttggttttaagatacttaaattttctctaatctattttgttttttttttaatatattagagtttatattgtatcctcaaacaatataaactctaatatatatccaaattaattagtatctttctatatattaaattttctctaatctattttgattttttttcactgattgttttattatcgttctatatatttttatatataatttatcctattaatttaatatcagaaacatgaaattgtgtttcaacaatacaaaacagagaagtgatcatgtctttaaattacttaaaaaaaacaccaaagtgaccatgtcttcaaacttaaaacaccaaagtgatgattaattatgtcttaaacttaaaaaacaccaaagtgattatgtcttaaacttaaaaaacaccaaagttaaaaaacacgacccatctacaacagcacttctcgtcattcctggaggaaaaaaaatgaaatcagttgttgtcatcatatttttcatacatgtaaatttaaagtatatacaaaccattgcaattttatcttctggccaggcaatagaagttccaagtgcatcttccatatactcgatttcagtagattgcctccaaactgcagcatctttaacaatcacaacatccacccatactcgagaagcattaggccccaaaggaacgtgatgtacacattgatcaggactgttagacgcccaacgtccttcagcaacaacacgcttctttccggatatatccatcaacttgcatttttgatttgctttgaaggcaagacgcttcaagaacaacaagcaatgaataaacacagaaatgaacaacccatcatcatcaacaaccaagcaattctttcttaaggtattagaagcatgtacctgtgatttgcgacgagaagatgtctctgtcagagatggttttgttttggttacaggtttcttcaaaggagcttttggagtctctggagacttgtcattctgagatgttggacttgctgatttagtctgagatcttggacttgctgatttcaaaatcacaggagacatctcattaagagattttatgctggaggccttagatgcagaacgctgaagaactggagattcactcgatgttgtctcaatcactactctatttgcaagccatgctataaagctgttcaacgaatcctgcaaagttctcatgtccaatgtaggcctccatagccatgtctttgggtttaaaatcgcatccacataaactttgactgcatttggaccaataggaagtccatttaccaacgcttgcggttctcaaaactaccatctcccttcagctaccacttcatcagtcttgcccaaagcctttagtgtgcatctgttcttagaagttgtgcttgggctctgtgtaacaaaaacagagatcggcatcaggtggaatgtcttctaatctatatacaaaagcaataaataagatacattataaccttaggtgcaatgtcttctaaactaacacgttcaggtggaacaatacataaatcggcatcccatgcaatcatttctccaactacatcctcaataatagacatctcaggtacaggtctccatattggagcttctggcttggtagcagattcaattaaaaccttaactacattaggccctagaggtatccaatgtagtaactcatcagcatcataagagacaacacggccctcaacaacattaccatcagaagaagtccagtcaaccaaattacatttaggaagtgatctggtatttacactcctatgaattgagttttcaccaacatcaggctcttgtctctgcaattccagaaacagatcaagacatataatattcctcacttagtacatttaggaattgatctagcatttactaacctggtcataaagtttttcaataatctgctctagatcctgaattatattctttatttgaatcttattggtttccattgcagccatagagcgactgttgacctgaaaacaagccaatttggacaagctcatgcctctgcccattgcacgcagtcttcctggattatcaggtcccaatatctgactaagcacatcttcctttggattagttgttgctgaatcctatgtcccttcaatatctatctcggttgcctttttctgcaaacagataacaaattaatccacaacatacattaatatataagcataatttaaaaggaacaagcataacatacaatcatttcagccgcatcgatgtgtacaggagtgccatccttcttagtacgtgactcaacccacactttcagccttgtcaccttggatggttcatcacttttttggactaattcttccctcaatctgaccattcctttacggccacaggtatgaggaatctgcttcttccttcttttcttatacgaatcacttactaccttaaattcatgactagtcttctctttgacaaacttacgccattcagccattgttacattaggtggtcgcagactcatcctgtctttcatgttatcagcttctctgacatctttggcaaggcgtgacttggatgatctccacagacatcccatctgagcaaaagctgcagttttttccatggctgatcaagatcaaaccttgcctgcattcaaatccaaaatacagaattcaaaatcaatccagaattcaaaatcacaacaacatgtcaaacagagagaattagaatacctcaatggatttccacaagacagttctgatatcttcactaactttcctccaatccggaattgtgtaaggaacatgttcccgtactattgttcctaaataggatccaaaaggtacttaacctggaccacaaggttctcccatgatagtataatcaacgtgaaccttttcatttggatccttggcgatgtgtttcatcttcgttggtcctcgtttctttttacgctttggttcagcagctgtttcagcaacatccatagtaggatcctcagcgtcagtagcagcagtatcatcaactggttcctcactttctctgttcacttcattgttagcatcttcattctctttatccactaactcagcctccacttcattagtttcatctgctagtaaatcagcctccacttcattagtttcatctgctagtaaatcagcctccacttcattattatctgcctgtacttcagtaaattcctgagtctcaatctgtctctcagctaactcgtcaatcttcttcttcttttggtatttcctttttcgattattcaccatcttggttcacctgaaacaaaacatagatttgttatcagaacaaattcttgagctgcaaaaataatctcaatctcacaaaacacacattataagcaataataagcaatcaaaactatcacaagtaatataatttcacacatagatcccttcacagtcaggttgggcattcctatcatcatcaaccaagtcatctgcaaggacatccatgtctactaatactggcaatggcccaacgtctgcattaccagattcagcatcttctgcactgtatcttctagtagaacctctcatagctacataccaactcgatgattcatctgcccttgaataaaacacttgctttgcttgagatgctagtatatatgtatctcttgcaaaggaaacttgactttggttaaggttgacaagtatgaagccatcttcttcctttactccatttcctatatttgcccattgacaccggaatataggaatgtagaagacattgtaatcaagcagtataatatccaccactcagccataataagacacaacatcaaccattggggtattgtcctttgaactagctatacacattgttgtcgcctcatgcaacacaccacagttctgagtctgcctatcaattgaaactgtatgaaaccgattgctattgactatgtaacccgcgtaagaccttgcgcatagacgaggaccatatgctaaccacttaactgtatcttcattatgagaagtcataggtatcaatttaaaaaaaaacaagtgtcgtttactatatagatagcatctcagagaataaaacaatacaaaaccagaaaatttacctgttcttttaaccaagaagcaaatttctgagaatgtgtattccataaaaatcctgaatcccgtctacacctttcactagaatcttgtagatgttctaggtgcatgctaaaattgaaagaaagcaaaacatcatctaaaccattgtgaatatcctaaaaaattaataaagagtaagttaagagaatagcttactccacataaggatcaagctgcgccatattatgaatcaccgcaagatgtgctatgttcttctcattctcagtaagagtaattgaagtggctgctgatataggtcgaccctccaatatagagcagttctcataatcagcatttctttcaatttcctcttcagcatttgttgtctttttcagtaaatcactgcagaatcgcatacattcctcagcaagatatgcttcagcaatacaaccctctggtcttgcagtgtttctgacaaaatccttgagaactttcatgtacctgaagataaaacagctacctttaagcataaaagtattctgtaaaagaaaaaacattataagctagtggattgtacctctcaaatgggtacatccaacggaaatgaactggtccacataaacgagcttccctgcctaagtggactgtcaaatgcaccattatatcgaagaaacttggaggaaagaacctctcaaacatgcagatagtttccacaatttcattctccattgcagaaacctctctgtcaataactcgctgacacagtttgttgaagaacgcacataagcgtccaatagctatcctaacacctttaggtaacaaacctataaatggataacattgaagattaaaaacaacacagcaaattatgcaagaatttcagctaaaagaattcatcttatacctctgattgcaactggaagaagttgttgcatcaacacatgataatcatgtgatttaagtcctttaatagtagaatcttctatcttcacacatctggaaatattagaacagtagccatctggacctctgaagtcaaataaccgcttatagaatactttcttctctgttttggacaaagaccaaggagctggaggaaggtaggttctttgtccacgggcttggggatgtaaatccttcctaataccaagcagttgcagatcttttcgagctttaataccatcctctgacttcccacaatgcagcattgtagagacaaggctagcagcaacatttctctccacgtgcatcacgtctaagttatgtctaaccggcatttcctagacaaaatagtaacagataataactttaatggctacgacatttatttttcaaaacttactccaaataatctgaacttgaataactttgataataaatcataccttccaatactctaacttgaataagattgagcgcttcttccatcttgaaagctcatcttcatctaattgttcttcctcttcttctgatgcaatggattcatcatcagtaccaaaagctgatccagtacaatcgttcatcttcctctttcttccttttacttttacatttccaaaatcagagttgatatatgttatgaccagtcagaatcctacctcttcttccattctcagctttaccatcaaaccatgctttctttcgcctataaagatgtgtgggtgacggagacttccgatgagacatatacacgtgctttctgcaattactcaaccacaagctatctgtgtgcttcccgcatattggacaacccattttgccttttactttgcagcctgctagatttccatatgcaggaaaatcctggatggtccacagaagcattgcttttaacgtgaatgttgtgtgactgaatgcatcataagttaactctcccttttcccacagatggttgagatcatctattagcggttctagatacacatctatattgtttccaggttgagttggaccaggaatcagcaatgtcaacattatgttctcctctttcatacacttgtcaggtggcatgttgtagttgactagcaaaacaggccatgcactatagttaacattcttcatgttgaaagggttaaacccatctgtggagattccaagcctaacattcatttgatggatacttctgattcatttgatcccatgtcacagaatctaccggatacgcatttttccatcggtgctcttgttactgaaatgccaccgtaagtctttcgccatgtcctctgatctgaacatcctcttgagacgtggaatgatcggaaagtacctaagtactttctgtggattacctttcttcacctcaccagttcgcgtgttaatcttccatcgtgaagaattgcatttaggacaactgtcgagcttctcaaactgatttctgaataaacagcagtcatttacacaagcatgtatcttttcataacccatatcaaaagtttgaagaaacttcttcacctcgtacaaggatgtgtgcaagacattacccttgggtagcatatttgacaaggactcgagtagcagatcaaaacttctatcagaccaaccaccttgagtctttagcctaaagattgaaacaatcgtagagagcttattgtgatttgtgcaacctggatagagaggtgtttctgcatagctagctttgttgaaaactcaacttcttccttatcaccagcctcatcaacatcaccttgactaaccagctcttcatctataaactcagcagctttgaacaacccaaaaatctcttggttccactgacttgcgttctttctataatcagatactgatttcacttctccatgatgataccagtcgtcccccaacttataactccaatccattccccttgttacaagatgatcaacaacatcagcagctaagtgacgatcaacgttgcgacagtcaatacacgggcaaataatcatcgcattttctcctaaacctgcagccacatacctcacaaaatcccaagcaccactctcataaccaggatcggttctgcatagaagtaagatgaaagcaaaaaaccatttacaaaatttaacatatcaattaaaccactatatacatgactataacatgttttcacatacctgttaagatgaacccatgacttgtcgaccattatttgtgcttacccataaaaaaaaaaacagacccataagaacaccaaacaaaaatatatattcatattttcacattcacagcaacagttcattaaaaccaaatagcaaacaaccaattcatcagtcaaatcttaaacaaatcaatcaaatacgaatttcattgtgagaactagcctctgtgttctgatgccaacaggcagaagatgcaggcagaagatccggctgtgatatgtgatcaatgtttaaaacggtcaaaaatcaaatacttgtaaatactcaagaactcaaatacattaactggatgttttatacctttcaggtgtatgagatcagttgggttcgagagattttagggttgttacagagacagagagagagacggaggcggagggagacggaggtggagagagacagaggtggagagagacagaggcggagggagacagaggcggcgagagacggaaacagagagagacgggggcggagagagacggaggcggagagagacggaggcggagagagacggaggcagagagatacggacgcggagagagacgggggcggagagagacggaggcggagagagacggagcgaatggagacggaggcggagagagacggagcgaatggagacggaggcggagagcgacggatcgaatggaggtgttgagaatcgagattcagtcaacacaaatttcacctcttttttttttttttttttcctaagtgtaaaagagatgaatttagtatatgaaattgacacttttttgttttgggggaaaagcccaattattttgcctccaaaatacacctttacccgctataatactgatttatgttcgcgcttaaagtaaactatatactagcggtaatatagtgctacgaaatacttggcaatacgattttggcactttagtagcagttcgtgaattcgtgctacaacgacctgctaccgaaactcatatttcttgtagtgatgtgttcagataaagatacagaataatatgtcgtaatcagaaaatataggaacctggaaatccagtgacaccaacgatatctccacgcttaacatgctaatgttaagtactgacgcatcacaagggaaaaaaactctagttaaactacatatataaaaaacaaaaaagaacaactatctctctaattaaaaccaattagtcacctcgcatcagtcataacttggatcttagaaccacgattatgtagatcatagaagaaaagcttgtcagaggaagatctcttgctcattattcgtcctaccaaaattcaaaaaaacattgaacatataaacttttttttcagtacaacaaacttcatggatgggtgtatcataccggctagagaaacttcgtcatcttcaacagactcttctttgcttaaagtagtatacttggcaatggattctgtcccttttacttctgcactgcaagatacctcaatctgttctcaaagtattgctgcaaattgaaatattcagaaaacttgcaatccgtgagatacataggaaattgaatggttatatgtatataccgtttggtccatattttcaacatactaccatcgatttcttgctttgggaactcgtctttggtggcttcaatgtaaaatcgatacgcaagttgttgggctgattttttactaatcccaattgggtttagtataatcaagttgtgtgaataagaaatgggccttaatggttaggtccagttcgtggtggagctccggagatgtcgggtcaaatagtgaacgtgacaaaacaagtcgttctgtttcaagttcctagagactcgctggtcgcttcttcaaagaccatgagaataggagtcgttgagagtcaagtccactactcctagacttccgattgatgtcggttgagtttgttgaaaaacaaattcaaaacctagtaatctaaatttctataaaaaccaactcttcaagtctttgagagacatagtgaagtatttgatcgttacacacaaacagcaaaagctctaacaatctctctctctcaaaagtaagtctcgagagtatcgtaataactatgttcgctagagctgcgtttcgagtgatgcgaaataagtttataaaggttatatcctgggatccttgaatcacacagaaaccgtcacactacgggtgattcaaagggttaagaaaagagttcataactcgactcctctcacgttcttaccttaatgtttgtgatttcgatttcaattgcctttatgtagtgtttgctaattttagctcctaccctcttaaccctttgaattcgttttgttctataaacattaacggtttggaattgaaacttcaaaaacgtgggaagcttgggagtatgtacattgactttactggttgcgatcgttaaacgtcaaactcactgtgacagaatttgcgtgtcttggacgtgtttcttttgagaacagagaaaaatcacttgaattctctgtggaggttcgaaatttagtgttacgttggtgctacctcagcttggaattgcgattttaagcttgagtatataacctgcagcttgttatctctacaaaggaatcatcaatccacagcttggttttgaaaatttaagattatcaaaacttgctttttggatttatttgtggcaagtagaagtctctgtttttttattgggaaaaaacccaaaaaaaccgccatttatttttaatttggccgtttaatacctctagtatttaatttggaagaaaaataccttagttaattttagttgcctattaaaactttcgttatttaaaaagttggtataatcgtacctgcgagttaaccctaaatctttagcactagaattgtaaaccctaaatctttagcattataattgaattgaggaaatctctaattgaaaaatgagaagatctagggtttaacctcaattgaaagaagagagaaaaataagtattggctgatttgaaataagaaaagcccagatgaatttgaggagattagatcaaaatccaaatcgatttaattcttcaattgctttcattgttaagtaaatctgtcagaaatctgaatcaaaaagatgaaaagactaggtagcgaaacgataaatatggtgattgagtgagaagagtaactaatgaaactgagaagaagaatcgaggaagaagatgaaagaaaaaacagcaaaaaaaaacgtttaaaaaggaataagggggtttcgaacccagactcatgagaaaaataagcaaatgtttaaccatctgactaagacaatatattcgtgaagtcaagaaaagcgattgtatatatttacttaattactatgagttaagttttgaccacagttaacgattccgttaggatagtcaacagaagttaactcggatgtacgattataccaactttttttaaaacaaaagttttaataggcaaccaaaattaactaaggtattttactttcaaattaaatattagaggtattaaacggccaaattaaaaatagattacggttttttttagggttttttcccttttttttttaatttcttatgttgtaaatataaacatataactagacgtgatttgaatttgaatgccttataatctgcagttttattggttttgtgaaacctgaacctttagtttgttttatgcaaatctaaaattgttatcagactttgaattgtgattcttgtcattaactgcagtttttggcttgtatttttctggttttgctaaaatctgcaacgtgttgtctttcacttgtttgctaattgttttgattaacaattgtcttttgcaaaacctgcaacgtctaagtggtttttaattaacaattggctttaaaacaaattgcaattgtttattgaataacgtggagttaacgaaatctggtacttggctttgctttcatttgtgtgtgtgcaaatagaaacattaatcaagtgtaacctgcagtttttctattgataactcacgatactgatctggttttgtgtttatttccagacatgtcgagtgagaacgtcaacttctcaacgtcgctgaggtcaccaactgtgggggtgaaagtgaagttgaaattcagtttggtactctccctccagtgaaagtagcgacacttgaacgtgtgcaaactgcaggcccttaacaatttcaacttccagcggcaaattcagcaggtctccttcccgacaagctcggtgggagctcatctaagatgtggcagaaaaagatgtttttctgcttgataacactgaagctgagccagtacaggcgtaaagagaaaccgatccttccagcgaacaacacgaaccctcatgcacttgcgagcgttcatacgtgggaacatggcgatttcctgtgtaaaggatatatccaaagccgcctctttgatctgttgtacaacatttactctaatgtggagatttttaagagcatccacattggttaatcccattatgggtggtgtctcaactttatttaattataaaattagtactattttaatttgaagacatttattattgttgttttaattgatcatctcccattggtgatccttgaatgggtgtcttttaaaaaaacaaaatattagtaaaaagtttattgtaacaaattttggttaattgttatgcaaaataagaaaaattaaaatataaattgtaattctagtgcattgataaaaagacaaatatattactttataaaaacgtttaaaaataatttagaatacaaaaaaaaaaaaaaaaaaaaaattcaaacctaaaacatgagaaaaacaagaaaacaaataagttgaatgataaaagggtgagtttaaaatatatacatggataaacaataaattaagaatttatacataaaaaactattatttaggtaaataggaaagagaaataaaatataaaccaaaattatctttcttttttagattaattacagaaatatcatcgattcaaaataactttaatatttgtaaataagtatataactatttgtttaacaaggtaacatatataataacgtgataaatttacatattatatgttaaacaaatatttatcaatttaaaattatggataagtatttttatttatatatatatatataaacacaataaaatacatcatgttacataattaacatgataacgattataacaacatgttacatagaataatagcatgctggtaagataatcgatatatgaataatatttatttgaacgtactaatgtttcatttaacgtactaatgtttttttctgtcagttaattatcaattcttctgggtatagatagtcatattacccatgataaaaacatataaaagcatgatcaagatcataattctctcagatcaactttttgccaaaaataaacagtaactctaaccaatctgctcctgacacgtaggatgtcttagattttcttcagcatgtcttttgtgtctcgccagagacacgagccttcccagtttcatcaatattttttttaattaatattaagaattatattttaattagaagacacacattttattgtgcaatgcggatggtctaaggagttttgcaactctctggataagaaatatggaacggaagatgctggatcacagaaatatgcaatggcgaagtttctagactacaaaatttaggactcacggcctctgatggtgcaagtcgaggagctgaccaatcttttgcatgaggtacacgcggaaggaatgaggatatgcgagacataccaagtagcttgtatgatagagaagcttcatccgggttggaacgacttcaaaaattacctcaagctgaagaggaagaggatgagtcttgaagccctcatcgttagactccgcatcgaatcaacgaatagaaaacaaatggcagttggtgtgcagattgtcgaccccaatgtaaatgtggcagagctcaaaacgccgaacgaagaaaagtggcagagctcaaaacgccgaaccaaaaaaagtggcagaacaaggggaaagggaaggttggtccgcaaaaaactcaaaagtttaaaaagaagtcttgttacaagtgtggtaaggagggccacaagtcttttgaatgtcgcaagaagaaggcttcaaataagaatgaagataaagtaactgaagaagacatgtgtgctgtcgtcactgaagccaacgttgctgaaagtcatcctaagacttggtggttcgatactggcgccactaggcacatatgcctcgacaggttgatgttttctagctacgtaaagaataagagtgatgaggagctcttcatggggaactcagccacgtcaatgattgaaggctacgggaaagtcgtcttaaagctcacctatggatgtgagctgattctgaccgacgtggtttatgtgcctgacatgcgcaagaatttagtctctggttctctcctgagcaagcacagatttgctttcaagattgatgtggataagctagtcatctcgaaaacatacgcaagtgataagaagaagaaacaaactaaaactttctaatgagcgctcacttccttttgccttttcttcttccttacgcctcctctctccctccctcttttggttcttcaaatccctctttacagcactgcacaattccacctcatctaaacccgaaatggcttgaaactgcggcacaaacaatagataaaattggaaaaggatcccaaaaaaacctactttgtgaagttactaactgtgtgctaggtctatacgtcgttatatgatgagagtgtataaaagacttgtatgtgtgcataaagtaaatgacacagagatttgttaacgaggtttggtaacaacctacatccccgggacctaatccagaaataactccactagaacaagatcgcaaatacaattgcatatgatattacagcataactatgcctaccactcttttctatatggactttggaaacagtatcaagccacgcatgtcttgactaccaccgagcagcaccaatgcatcaccgtcttctctaacggctgcagattccaaaggaataccaccaacagatcatcatctgtatttggtggggcgaagccacacacaagtgtgtgcatctctctccactataccatacacgcgcaacctttttatgtcacggcaaccatctatatataatcaagacaaaaccctagggtccaaatattctcgcaatctttttgccttgattcgaaagtatctggactaccactaaaggaaacatcacgtctccaatagaatcatgccatgtcatcttcattcctcacttgattctttctgcgttcagttcgcctactgtgttacacagctgctacctgtgaaacacaactctgatactttctattgatactccagcttcacaatcacatagctctttacaatatctgttgctcaatacctctgttgctcaacacctttgttgatgtctgcataactcttgttgcattctgtgtcaactcctttgttgtagcacggtctgtatcatccatgtttcactcacacgttcttgttgcagtgtagtctgtatcatctcatatcttgagctgtgtgtcatcatcttgagtctaacaaccagttacaaatatactctcattctccccctttgttactgcgttttagaactcaagctcaccttagaagattgtactttgatgatcttcaagctt

SEQ ID NO: 489 - DNA, 101371 bp, Arabidopsis thaliana
atgcaagcttgaacctttagtcctttagggcatttagggtttacattgaaccttaaaagctataacctttagctttgtattgaactctctttttgttaatatttttcaatatggaaactggatctaacggtctgtcggaagtatcttgtttatcccttcagattgttttcgatttaatgaatgattttcatgtctcttggacagtaagcttgaacctttagggctttgtcttaaactctttcttttgtagtaattcgatgtataggttttgtggtggcaattttgagctttgtcttggttgtcggattgttcaaatttcttcaaagtcttgtacatgcttgtggtatattcttggttcttgctacgtgttagttagtgctagagctcaaatttcatgtttcaggtgccgttagggatgagttctgtctctacggcgtcactgaattgtcttccagatgagcttcttgtccacgtcttgtcctccctggaaacgaaacaagctgcttcaacctctgttctctccaagaggtggaggactttgtttgctgtccggcgtaatcttgactttgacgattccatcatttctcacccggaagtgggtgaacagaacatggacgacgttcaagagagtttcagggactttgtcgataaaagattggctttccaaggcagtgtccctatcaacaagttctcacttatatatggagataaacatgacgatgttcgtgttgatcgctggataaataccgcgctggaacacggtgtctctgagcttcatttatgcttaacatctgtgactcgacgtctacatcgtttcccatccaatgtattcaggagcacaacattggttaaacttacattgggaacaaatctcttcatcgtctattttccttctgatacgtgtcttccggttcttaagattctcgtccttgattcgatttggtttgatagaataaagttctctaatgtgcttcttgctggatgccctgcacttgaggacttaaccatagaccaaaagtcttttccagggttgccgaacgttgtttcgagcaaaaccgttaagagtctatccatcgtctataaatattctgctgatttcgattggtttcgcactgttgcacttgacacaccaaaccttgtcaccctcctctactctacctatgctcggcataggtatcgacattgcaatttagagtcccttgtcaatgctacactggatcttcatttcttagaaaattgtgatgaggcttttgaaccgaatgtgacggatctcatgattgcggtacgcaatgtccagatgcttcatttgacttcttctgctactgaggtcagtttcattttgtgtaaagtctcataatctttcggttagaaaacatgataacattctttgtgtgtgtgtgtgtgtgtttcaggtgatttcgcaatgctgcaaaggcgggctccccatgttcaaaaacctccttgttttagtgtttttgggtaacactgaacgagtttggaaagtgtttcttccacttctgctagagcattctccgaacctaacaaaattgtgtctcgaggtaagaagtaaaatcttactttatctatgtatgactgttgcatgggattaaagtagtctctcttcttaatacttcagggtctgtatcatggcacagatgaagatgagtttgatgaaattcacattccccggagtaacaaagttaacatgttgcgtatcatacagtgtcaaggaactgaaaacgagctgaaacacattagccatttcttactgaaaatggagtgtcttcaattggtgcaagtcaatttttcagagacaattgttgactccaaaaaggtgcaactcacagaggatctgatgaagcttccctctgcttcatccaggctcacgatgcaagtcatttgatcatcatcgtcgtcgtcatcatcatcatcgtcatcatcatcatcatcatcatcatcatcatcatcatcatcatccatgtgttgttttatttcttcaaaactcaattgataaggtctttattgttttaactatttatggtttatgtttaggtcttttggtcttgaaaatagggcttcttgaacaattattgtttatgtgtttttcttttattctccagcataacgggaactatttgttgttggcttcttcgtactcttaccatagaagttagtagtgtttcggaaaagacagggctttgtgatttttgtaggttttgatatggtagttcaaagtaataattagtgttaggatctatacaccaaagaacataatcgtcttgtctgatctgatatgattgtgtctgaatcttatgtaacaatgagtcaatgaatgtgtttttaaaatttaattaaaaatagaataaatcaaattttaataaaaaatgtcacaatcggatgtcccaaagggataagctatgaagttaatatatataattttataaaaaatttaagtattaatattgatttaaataaatttaataatcttattttgaattttaaaaattaatctgaattcacttgttatcaattaaaacaatacattcttaatgtattataattaaaacttactttcaaaatattttataaactgaatttttcccctaattaaatgtaaatgttatcatataaccaattttaagtgactttaagatctttaccttttgttcctctcaaatttgaggaacaataattttgttctatggttcgtcataagaagaatattgaggaattacgtaggatctactttgagtaaacattccttctaaatggtaaacatttttggggacaaatagggaaatgaaattcgtccttattatattcctaaaatagttgccatcaatattaggaaacaacaatcatattatataccatattattttttattttattttaataccaaatttgtttatgcatagcttcatttctaattgttgtatataaaacaatgcatctaatattttccccctgatttaaaaattctaagcaaccccaaaactctctttatttttagggaatattaggcagaatgagactttttgagttctaattaggcaatagagtactttcatgggagtaggcactttttcaagtttttttaccattaatctctcaaaactaagttaactatagttactttgatatagttgaggaattaaataatatttttcttccttttcttttctttcttccttttcttttctttcttcctttttccttctttcttcttcctctctcccaaatgacgtgacatctctctcaaatctcaattacacttcctggctcgaatccgtagtcaatcctatttccgataggagtagttgacaattgaatccaactttttccattattttcatttcatacccgtatatagtgcgaaaggaaagcctctctcccaagactaactcaaattttatagcaaatttcaacttgtttgattcaaatagaaattaaattttatagattttataaaccaatttgtttgattcaacttgattagtcaaaattgttaagatccggtgataaactcaaatattttcaatctttttttacttttctttgtttaatttgacctaattttgatgaataaggtaaagactttaatttgtttttgtgatagttgatggagaggtgaaatgtgagaggtggaagagggatgatgatgatggtggtaataatggttatggttttgatgaatcaaagaagacatggtggttgaataggttaatgggtcggaggaagaagatgatatcagagtgataggcggctagggtttcaaggaaaggatgatatgtatacaaattactattttgtcattcttatttgtatgcagaccacgtggtcagagtttggtggatgtgcatcgatggtcgataattcgaaatgattgaaatgaccacatggtcaaagtttggtggatgtgtgttgatggtcgataattcaaaatgattgcgttttgataatactatccataaaacaagtgttacgttatgaaaaagatgttgataaaatatggtgaaacaagttctgttggtcatatccacaaaagtttatttacgaaaatgttaatatttatttatccacgattacatattaacaaataataaatacgagtgtatattgtatgattggttatgaacacatcgatctcaatagtattttacgttttcagattaagaagaatgctttagattatcatggaccagaattgatggttatagattatgtacatataaaacttaggatttagggtttaggctttaaagtcaagggctagggtttaatgtctagggtttaggatttagtatctagggtttacattttaggattttggctttattgtttaggatttagcgtttagtttatatgatttagggttttgcgttgaagaatcatggttgtctacaatgatttagggtttatggttacatgtttctcgtttgagattatatattccattgttgtccatatggattgaatcatatgaattttctatttaaatttgtttatatttaggagacttatgtttaatatttatggacaacaacaagaaggtttaaagttaagagcttaggatttagggtttagggtacgtgatatggtatatgtatattgttaagggtttagtctttatggtttagggtttaggggtttagggtttagggtttaaggtttagggtttagagtttaaggtttaagttataagaatttctccatacagtacataaagattttttgcctttagacatttccaaaaaaaaggattgtagagactatcaagactggaccagtatacaaaatctctagatttgtccaacctaaaatatatgaccacgttgatatgtatagttgaacaatatatgccccaatatataagtattttttgggttctcaaaccacttgggtttgttatgatggataacgtaaagctaacgctagttgttaaggttaattgtttaggttaaatttttaggatatatggttgctaattatgtgtaaatggtttagtgataagtattaatagtttatttatttatttgggtttaggttttagggaaatactgtttaggaattatattttagggtttaggatctagggttaaggtgttggtgtttagggtataattattattgtatggattttagagtttagcgttagagtttatagtttagcaaattagtggtttagggtttagagattaggatttagggtttagggtaatgttatagagttttggggttagggtttagggtttaccattagggtttagtgcatagtgtttagggtatagtactgtttataagaagtttaattattataaatatttttaaatatattaatacaagacggtataatacggtgaaatcttagatataacaattaaaatacaattataaaatttggatcgatgttaaaacttttttgaagtttctaatattacatttgaactttataagaaaatgacaaaatgatgtttaatttcatgggacggggttatatggtgtgacggatttaggttgatattaatattagatggtatactatgggtgaaatcataggattaacaatcaaaatacaattatacaattgtttaaaataacaaaactaacaatattaataaaacaaatataaattaaaattttaatttttttagttataaaaatcgtcttaaggtgtatcataaataaaaaacaatagcatatatctaaattattttaaaaacaaaaatttaattttgataaatatataagtttgtggtataccttttaatataatttatatataaataatattaattaaataaaatcttcaattttctaataaaatatcaatgtgcagtataccacgagtcagtctcactctctagtcatacataaaataatgaaaaatggtgctatagaaaaaggattgcgaattggaagattctgtagctttgagatacaattgtttatatacaaagaaaaaaaaagaattgtttatatataggggtgtcaaaatgggtcaaaattcatgggtcaacccaactcaactcaacccatgaaccctaatgagttaaaatttttgactcaaatgagttgatgggtcaaatgagttattgggttaattggtttggtgagtaaaatgagttgggttggaatggttaatggtttcaatggtttacccaattaacccatcaaattttgtaaaattgaattaaaccaactaaaatctctaaaccaatatcagtttaagtttaaccaacatatctaaaccaatttataaaatcaatatttttgccaaatttcttaaatatacaagcgatgaaattgaaaaaaagtaaactcgtgattttcccgccaaaaacgtaaacccgaaattttcccgccaaaaacgtaaactcgtaattttcctgccgaaaacataaacccgtaatttttcccgcccaaaaacgtaaacccttaattttcccgccaaaaacgtaaacccgtgatttttccgccaaaaaactaaactcgtgattttcccgccaaaaaagtaaactcgtgattttcccgccaaaaacgtaaacccataattttcccgccaaaaacgtaaacccgtaattttcccgccaaaaatataaacccgtaattttctcgccaaaaacgtaaacccttaattttcccgccaaaaacgtaaacccgtgattttcccgccaaaaacgtaaacccgtgattttcccgcccaaaaacgtaaacgcgtgatttacccgccaaaaacttaaatccgtaattttcccgccaaaattgtaaacccgtgattttcccgcctaaaacgtaaacccttaatttttccgtcaaaaccttaaacccgtaatttcccggcctaaaacaaaaacccgtgattttctcgccaaaaacctaaactcgtgattttcccgccaaaaacgtaaacccgtaattttcccaccaaaaacgtaaacccgtaatttccccgccaaaaacgaaaattcgtaaaagtgaaatccgtaaatatcctagtatgatgataataaattaataattattaataataataattatttattattgttttataataataattaattaaattattactcaaatgggttaacccatcaaattaaatgagttatgggttgacccaactcattatgttaaataggttgggtcaacccataacttatttaattctaaactcatttaattatgagttgagttgagttgggttaaccgttttgacacccctatttatatacatcaagaattctacagccttctaattacaacataattgtagttcatatactttgacttatttgggaccatgattgattatttgagaccatggttgatctgtaatgtaatcgtgattgattcttgacaggagcaacatttgttgatcaattatacattaaattacactttgatagaaataatatggccggaagcgtcaaatgttttacgcaattaaaaacgaccgttaggaaacaaacgagaccaacgagaattcaaagttcaaagttgaattaaatagatgtgattataaaacattactcgttttagtatataaagaaaatggtgtggccgagtaactcgttatgttttttcttttaaagagttcaaaaaataaaagaagctttggctattggaatttctatttagcgttacacttacttataccactggttacacttactcaatctggttcgagttatatcacatattggtttacttctgtttctattgaaaatttgcaatcacacatatattttattcacgtatggtaattgcaacttataattatttttattgcatatacgtccataaaaggatggtgtccaataagaggtcgttataaaatgtagaaacctgaaagtacctccattggtggagtcctaacgtggaatcttttaatttttttaagaataaattttgattattttgaagtttagagattttgttgagtctttactatttttattgtccaatggtggaatccttaagtgggtttctttaaagaaaaaaaaggttagttttaaaatgaaaaatcataagtatttcgatttgataaagcataataattattaaaaattcttaaatcataaacatatatgacataaaaacatataaaaagacaaataaaaaattggaataacgattaaatttaaatttgactcaaataatatttttgctatctattcaattaaaagaaaccaaaagcaattagatttattttcaaatttatcttcagaagatattaaaaaaatgtgaaagattttatgttttgttttgtcttcttctccagccaatgaaaaactaccacatataagtttcttagaaaccaaagaatacctaagctaaggtgcataccttgcttaatttcacatttttgaattatttttaaacttttttcataaggatttgtgcttagaaactcttaaggatcaccaatggaggtggtctgagaatgggtctgtttgattgattctattaagaagggatgattaattggtgagaacatattgaaaaggacaaaaaggagttctaggagatataatcgctcttcaaccaacttaaaatgagaccattccgtttatactttctacatcattttttcaactgcaggtggaatctttaaaacgtatattcgtaatacacccagacatagcactagagttcaaagcaaagaaccaacatatgaggacatcatgcataaatctgttgtgattctcactttctctctatcttttactctgttttggtttcattgtctttagagagaaagaacaaaaaccattttactttaatcttctacattgataattgcttgaatacattacacaacacaaagacacaacactattggatggagttggcaaagacattcttaaacagtttggatctttataaaaaatgttacctgtgaaggaagaacctgaaacacattgacatcaaagctttcaccatcatcatttagccttatccttttcgaggttgagtattttcagaaacatctaatttgccaataacctgaagaacatctacctctgcaataatcttgacttcattgttcacaagaaatccaccttctttggcattaagttcggaaaggagtagcatttcttctaacccatgacaagagagtttttcctcgaacaacaattttgacttcattgtttactctctacgtggtaaaatgtttctttttaacagattcatcaaagttaagcttttaattagctaacataaatactgaaaattgataaatacaccttgtagcttaacctttgctgacaataatctgtttgcatagtcatcaagaatgaggcaactaacaaaatcctagcaagttctctcaacaaaaaggtttgttctttaaaataaaatataggagcttccagtttcaataaaagtctctctagcttcctatgttaggacctaattttgaaacctagactcaaactcttcctctaattcttgcatccgagtcttaccaatctgctcttctatcttcttttcctttacttcttccagtttacgctccaaccaatccaccttaaagtctgaatctttcaggtatgttagtgctctctctgcttggccgaggtcatcaatggaaaaatcttgcagtgactggcacagtgtatcgattaggctgaggagtacattcatacatgatgtcctcacatattggttctttgctcggaactccagtgccatgtctgagtgtctttcgaatataagtttcgcagattccacctgaagttataaaaaatgatgaataaagtataaaactcatatctataaaagagtttgaatctttgagaacttgttacttgtgaaggaagaactagaaacccattgacatcgactgatgaagtttccttgtgcaaatgactagacacctcagaaacatctaagttgccaataacttgaagaacatcaacctccacaacaattttgacttcatttttcacaagaaatccaccttttctgacattaagtttggcaagagaaatcatttcttcatacccatgaacaggaatcttttcatcgaaccatcgttctgtttctgaagaccacgaaaagataaaattgatgtaactcaaaacaaacacaaacacacgaactttcttttgtccaaaagcgttatggaactgacctcgatgtaaggagagtttatcggaaatttgatttacaacagttaggcaaaatcttgcgtgtcttctccatccacaaggcaaattttgaaaatcagcaacaacgagaaacagagaaaaaaaattagcagttttttctcccataagaatcctgcaagaaccaaattaaatcagattgcaaattagatgagaagttcttaatcatccaagtgaactcattccccattggagacgactcgtcgcaaccaaaaaggtccaacactatcaaagcgtgaagacaagcagcaattttgtgctcattcaagtgaactcgttccccactggcactgttgtgtcttaaccacgcttgtgtcgtcgtttggtgttcttcattatggttttatgggcttcggcccaattttgtaaatgccatttagagagatttttccgaaaccacccacaaatatttgcttggtacagactatagtacttagaaaatgttccaaacagcttaaaataaaaacaaattttcaggtttggtataaaaatgagtttttctttcagcatttgacaaaagtcagaattactaagtatagtcaatacttgtagtttttgagcatgcatgtttgtatatatgttttgacgattttttggtcttttcttaacttcaaaaatcattagtctcccctaatgagtgatgaagtttcagattttcttagagaagtaaacttttgacagtattaaaatattttaaaagacaatatacatatgaacccataatgttttttatgtccattatgttcctcaggtagatttatgatccgattcttggactagagatcgtaaaactttataggctctgcctctaatgttcttgcacacgtataatggaaaatacatgcaacactagcgagggaatttgtagattttttttctaaattcagcttccaaaagctacaaggattgtttttttccttgaggaactgtaaactcataaaaaaaaaactcggtttaagaccaaagttaagcttttgatttgcttaataagcgctaagattataatttaacattgccttacctttggcggtgataatctggttacatagtcatgaatgagacaacaaacaaaatcctagtcctagcgagtcctcttaacaaaaaaataaaaaacaaaagactctctagcttcctatgttaggactctgattttaaaacctagattcaaacgaacataacacctagcagatacaacgagatggtgatctccttctccattcatgcatgctcttgtatctcttacaaattgtgttatatgagcgcctttaaagtttgtattttatgattaattgagaaaaacattattttgttacgatgacttttaatcatacttgtgaaaatgagacatctctcttgattcttcaggttgattttggaacagatgcaaagcattgcttttgcaaagaaagtgacttgttagctatcgtcccgtgagatctaccattgaagttgcattcaatatcatctaccaaagagttccaggttttgttttttcatgtaacaacatatgttctgtaattttagtgacaacatatgttttgtttttttcttgtaatttcagtgacaacatgttttttcttgtaatttcagttacatcatatatggaagaagagatggtcaagaagatgaagaatatggaagaattgggtcgtgaaatggctaagtcaactttgattagagtagatgttgtcgttgtaattgtgagctgaaacacatgagagacgagatgtcgtgaattaatgtattgttgtcgattcccaatttaaattgtggcatgtagtaagtgagataatgtaatgtcgttgattcctgtttaaatcttaacaaatgacaatgagaaccaacataaatccgttacaatgtcaaagtagaaaccaacataaatctgtaacaatgtcaaaataggaacaaaagaaaccaaaactagcaaatagtaatctgtaacactcaaaacaataaaaacatgtaacaatcttaaaaacttgcaacacttctaaaaaccatctgaaaatccttgcgtgagtgtttatgagtttaatttaaattctgaaaatgatatgtaatatttctttgacttaaagatttcaaatttgaacttgtatacttcctctattcctagttatttgatgttttggatttcgcataggaattaagaaaaaaatgacttattattttaataattatttattagtttaatactaatattagttttacttctctcctttcactattcgtcacaaactaaaataataatgatagttttctaaacatcaatcttgatagaacaagtaaaaaattcaaaacatcaaataattaggaacaaagagagtacatatcgattatagtatgagtgtaaaattgtagaatattcaatagatttgaagttgtgagattgacaaaatcttgattaatttgtgagattaacatatatgaatattgatatattgatattaatcaaaagaactctaaatactttatacaatcaatattcaaattatttactatttcttccatcattgaatttaattactaattatttactatatagacttgtgaaatttaataaagacgttcaaagttatttcgatgcacataatcagatattgaagaaaataaaccataattcggttgctaagtaaagtaaatgtaaattttaaaggtacaatataacaacttaaaacgataatctaacacatgtatataattaccaaataaaagtcaataaattataggttggcttaaaagtccataaagtcaataatttactatccattttttagttcaagagcttatttccgtacagaatgaagtcttaacaagatgaaacaacgaggaagaaggtcaatggaagaagaatcttagagaagagatatcaaagatttttgagtttcttcctcaaaatattcaaggatcttatcagatttactaagcgtcattgtggatcttaatcactaactaataatcatttgagtacgtcctatactcttatgaagaaaaaaaagtttcaattttcaaattctgaaaaacaaacaaacatagattttagctttttatgcatcttcaacatatgaatcaagtatgcattgggaacattaaaatccaatatgatcactccatataacatattcttaagaatctaaaatgactttaacctcaccagaattagcacttggtgatttttaactcttttcacttttgttttttaatggctcttttaaatatatgttcgcaaaacaaaaaattagcttccaaaacttataaaggctatatagatcttactaaaaaaaatcaaaatgcattatgttttcaatcactttctaatgaatatttttgttctacatatatcatgaattatgacaaataacattcaatacctacatacaacttaacaaagtttcattaaacaaaagaagtccgcggcttggcgcaggttttgccctagtaatattaataatgtcctaagatttatctttttttatactaattagaattgatggagatatattaaataagaaaatcctagtaattagaaatattaattaattgataaaaatattgctaatgacattctttgtaaataagttccaacttgaagatttatttcataatgcaaaaatctatatattgatattttactttctatcttaaacactttgtttccttatttgatcctaaatatttatctcttacgtggttgtacctactagtttatcctcgttatatttcttttgtaaatgactaataaataaatggagagtagagtatacattaaccttaagagtttatagcttgactgtaattaggttatacataatctttctactttgtaattaagaagagcaccaaatgactaactgtgaccacttggtgctgtttaattaagagttactctctagttggtaaaagtttaacggattcatcaaagttaagcttttaattagcttaataagctaagataaatactgaatactgatagatacacctattagtttaagcttttgccggcaataatctgtttacatagtcaggaacaaggcaactaacaaaatcctagcaagtcttcaacaaaacaattagttctttaaaaaatataggagcttccagtttcaacaaaagtctctctagcttcctatgttaggaccctaattttgaaacctagactcaaacgaaaataaaaactagcagaacctaagtcatgagacaacatcatccaaggttagaggaggagctctggcggcggccaacacctttgtcttctctttctcgagcagagcttctgtgtccgagcacttttgcttcaagtccttgagttcttccttctctttctccagtagagcttctatttcagatcaaattcttcttgaagaccttcaggtcttcctctaatccttgcatccgagacttaccaatgtgctcttggatcttcttttccgttacttcctccagtttacgctccaaccaatccaccttaaagcccgaatttttcaggtatgttagtgcttgctctgtttggcccaggtcagcaatagaaaggttttgcggtgacatgcacattgtctcaattaggttgaggaggacatttatgcatgaagtcctcaattgttggttatttgctcggaacgttaatgtcatttcagggtggctttcgaatatacgtttaacagattccacctgcaattgttaaagagcatggaaaaagtgtaaactcatatccataaactgaatggttgactattaaagattcttttgctctgtattaagatgtgttcaaaacgcacaaagaaaaactcatctcctgtattaaaccttttacggtaaaagttttacctgtgaagcaagaactagaaacccattgacatcaatggtttgcaaatgagtagatgctgcaccatcatcgtttagccttatccttttcagaggttgagtcacctcttgagaaacatctaatccgccaacaacttgaagaacgtctacctccacaacaatcttgactttattgttcacaagaaatccacctttcttggcattaagtttggtaagggaaatcatttctcgatacccaatgagaatattcatgcgatctaacctggtttaagaccaaaagttaagcttttgacttgcttaataagctaagattatagctgatcactgaaaagtacacttagtagctttacctttgccagcgataatacagtattattaatacttttacatagtcacgaaagagacaactaacaaaatcctagtcctagtgagtcatctttacaaaaagattagctctttacaattccgacagaattctctctagcatctagcttcctaagttaggactttaatttcgaaaactagatacaaacgaacataacacctaacagaacctaagtcatcagagaatatcgtcaaacgttagaggagttctggcagcagcagccaacacctttcccttctctttctccagcagagcttctatgtctgagcacttttgcttcaatcccttgagttcttccttctctttctccagtagagcttctatgtcagagcacttcttcttgaagaccttcaggtcttcctctaatccttgcatccgagacttaccaatgtgctcttggatcttcttttcctttacttcctccagtttacgctccagccaatccaccttaaatccagaattttgcaggaatgttagtacttgctctgtttggcctaggtcatcaatggaaatatcttgcagtgactggcacaacgtcttgattaggctgaggaggacatttatacatgatgccctcaactgttggttctttgctcggaactctaatgccatgtatgggtgtctttcgaatatacgcttcacagattccgcctgcagttgtaaaaaaggatgaataaagtataaactcatacgtctagttgtatacatatccacatactgaatggtagataataaagataccatttttttccctaattggtttagtgttctactgataaattcaaaaaagcaccacctctaatccaaaatcagcaacaacaaagaattaaatgataagtctcatgagtttgaagccaatagttatgagtatttatccaaatcagttcctctctaacgaaacatatctaaaaagtttgaatctttattaacatgttacctgtgaaggaagaacttgaaacccattgacatctactgatgaagtttccttgtgcaaatgactagacaccgcaccaccatcaccatatagcctcatccttttccgaggtttaattacctcttgagattccttagaaacatctaatttgccaataacttcaagaacatctacctccgcaacaatcttgacttcattgttcacaagaaatccaccatgtttggcattaagtttggtaagaagaagcacttcttcatacccacacagaggaagctttttatcaaaccatcgttttccttctgtagaccataaaaagacaaaactgatgtaactcaaacacaaacaaaatacgaactttcctttgtccaaaagccttaatagaactcacctcctcgtcgggagaggttttcggagagttgatttacaacagttaggcgaaatcttatgcgccttctacatccacaaggcaaagtttttaaagtaggaccatccagatacagagacaaataactagcattctgttttccattgggataggccaaaagacacctgcaagcatttaaaaaaccattaaaacaatggagaatgttctttcaacctaaaattgaacgaaaaggcaccaaatataacagttgtcttcttcttaccatttgcagccaccgatcacgaatatatcagatttaatgtactcagattgcaaagatgagaaattcttaatcacccaagtgaatttctcataccccattgaagtaagacaacctaactatcaaagcttgaagacgatcaacgaaaccctataacctcactgtcactggcactgttatgtcgaaccttgacttttgcgtcgctcgtctacttcacttattggttataggcttcggcccgattttaccattttggcctaatttaacataacttttgtggttgatttggaaatagttaaaaaaaatatggttgacaaaatgaaaaaaaactacatcataaaatttaagtgttattatctgtagaatttcgtcagcaaacaatctatagagatcacaaaatcactatagtatttttttttctacaatattaactaacttccgctactttaaaaagaaaaaaaaaaaaagttttctctttcttctaaagtatcttttagagagaggaaagctacaatcttcttttgttttcataaatcaaaatcggatcttgtatcattgttatcttccgattttgtattggtttgtttctttttctttgtttaccggctaagtccggtttgttcttccgacttgtttaagataatttttcgactttgttcggatcttttgtagccttttgcagctttgaaacccagtttttttgaagctgtaaaattccaggagtttagatggattcttgcattgttggatggttgattagtctaccaagagaaggtaaatccccgcttgtcctaatagatcgttaaaagcgtcggttctacttttggttgattcaatcaagtggttgcggttgatggaaacgaaatatgaagatttggagttctcatcgtgttttgatgattctctcaagaatattttggatctggtcaactgaggtcaaatttccggtgagcgagtttaaatccaaccatttcttccggtgatcaatcgcaaaaggcaataggtacaatagaaggctataggagtgaaagcttcatgaagaacctaaacaaattatacgtcggccgattacgaaagtttccgacaaagaactctggttagtgatgagtcggtgaacggcgaagttgacgaagcttcataacccacgttgcataacacatgtttcaaaattgttttccttatcttgtactgttttgcaattagtggaccttattaggcctttctttgtattgactatatgctcgtttggactttataaaatatatatatgacaaaaaaaaaaaaaaaatattacccggtgttatacggattagtacctagtaacgctataaacatgcagcttccagaaacgttctacagtgtccaaacaaaatgttaccggttcaaatttttggatcaagaatgatattgaaacaacccaaccctttttttaaaaaaaaaaaatataattaaatattctcataaatatttaattaaatcaaccaataacataataattaaaccgtaaatcaaaaatactattttataaataaataaataattcgaccaacaaaaccaagaataactgacaatcctaaccggattccaataaccaaaaataccaaaaataaaacaaacgagttcctagatcatcctctcttcctagccatgattccacgatcacactttatctttacctgcatcaacaacacaacgagatgcgtaaatattatcataaatacttagtgaggcgatcctcccatctacgagctatacacacaagcaaataaaagggtataatcacgaatacaatacaaacaaatcagtcattgaacaattcacccaaaacacattcaccacacctacatatcatcacacaaaataaatcacacaacccaatcgctcagataagctcatggtcacgcactcaccttaacaaattgattctaagagcaattaaacacaggagagactctccttgcgtctgaaacagtccataaacgtcctacaacaagtccacaaccaaaagcaaccttgaagcaaactggacaggaaaaaccagaaacaagcagtctcaaagacgaaaccctaaaatacaagctaaccgttaactattcaatcgctccagtgatatcctagctgcagacgtcacaaagctgcccacaaaatctcgtgccgatcggaaaacagacgagaccacgatctcagtttcaatctccgctggtcctaattcgcgtctgagaaaacgtgtctcacaaaactgcgaataactcaaccaattttaatccaaatccaattctgtaaattggagaataacgataaaggacttgagaataactataccaaatttcgttaccttttaccacgatttgatatgacgaaactgatttctcccaaaccctaatgattctgctccttctccttttctctctttttctcctttataaacgaaaagtggctaactaaagcctaatttcgaggttccttcttttataggcacactctagggtttgttattaacccaaccaattaaaccggatgatttaaaaacaaatcctaatcgattttccggttcacgggcgttacaattctctcccactaacatagattcgtcctcgaatctagcttcacccttccactccgaggaactccgtgcaaccatcactacagtccgcactccctccaaccagaccccctctaggtctctctatccagtcgatatactcacgatttactagtcattgttgctcacaactcactctccactctcagaccgcaatcttcgagcataaaccgtcactctcaggcttcggcctacgatatctcgggtatcacacatattatcttccccactcaaagtcaaacccagagttgtgtcgactcactctcagccacaaagtcatcgagttacgacacttggagaaaataataccacaaaactcgctctcgggtcgtcaccctaaagcgtgctctcggatcgtcacccgaagccaccatacccctcgagttaccggtacctcaggagcataccccgctcctcacgagtcgttgggaccctcatgtccctcgagcaacaatactaaacgcttccgagcatatatccagactctctcatggattcgcgtaagacacctctatgcctcatcatcgatcatatcccctcgagaacatccttatgaccaactcccggccatctcgtaaacacacctttctcttaggttgtttactcaaactttccaaaaataaacaagtcctttctgggaaactttccatttttggaaaccgcacaacacatacttaaataagacaactcaagtcaaatccaagaaaaaaatactcatcttattaatcatcaactgtcatgatcgttacaactccaaacgtaaatacaaatgaaagagaaataagaacaacaacttaaaagctcaaaaactcaacaacactgaaactggaaaccaaggaaaggccaactcatgcagcaacctgcttctcgaaccacttcttgaaccttgccttcatcctcgtctctgactcccaagtctcctctgtcacaccatcgcagtcccacagcactttgatcaaaggaatcttcttccgccgaagttccttgatcctcctctcgagaaccctcactggtctcgcctccaaagtcatgttgggctgaagatcctctggaatcttagccaacacctcatcatccttgtgaagacacttcctcagcatcgacacatgaaagaccttgtgaaacgcacgcataacatcagacaactctaacctgtatgccactggtcccaccctctcaacaatcctgaacggacccatgtacctcggactcaacttagtctctgagatagacctgttcggaccacgcaacatagccatcttaagatacactatgtccccaacctcaaactcaagctctctcctcctcttgtcagcataactccgctgtcgatcctgagcttccttcatgttcagcttaagaacctggatcctctccgtggtctcctgaacataatctgcaccatatatgctcctctcccccacttgggtccagcataacggtgtcctgcatggcctcccgtacaacgcctcaaaaggagtcatcccaatactcgcctgatagctattgttataagcaaactctaccagactcaagtgatccgcccaatgacctccccaatccaagacacacatccgcaacatatcctcaagcgtctgaatagtcctctcagattgcccatctgtctgtgatgataagccgtgctcatctgcaccttagtacccatctctgcctaaaaggctctccaaaatgcaaaagtaaacttggaatccctgtctgacacaatactcacaggtattccatgcaacttcacgatctcgctcacatatttcttagccaacaccgccgctccatcgggttttctgatggccagaaaatgtgctgacttagtcagacggtccacgatcacccaaatagcacctttggttcgcgacacaggcaacccaaccacaaaatccatcgtgataaaatcccacttccactcaggaatagctaaactctgaaacaggccacctgccacctgatgctcagccttaactaactggcaaacatcgcactctacaacccaattagctacatccctcttcatcccgacccactgatagtaccgcttgaggtctcggtacatcttagtcgctcctgaatgaatggaaaacatgctcgcatgagcctcactcaagatctcccgtcgcaactcctcatccttaggcacacaaactcgcccatgcacaaggatagtcccattagctgcaaactgatactcagagccctctgccttagaagccgcaatcaacccctcatctttctcctaagccaaccgaactctagtcagaagatctgctcgatccacagcttccaatcctaatggctctcgtgccacagcacacaaccgcaaaacaccaatctcactcaccaaggcctcaacactctgccctggagccgcgcccacgcgcttacggctcaaccgtctgcaaccacattagccttaccaggatggtaagctatctccagatcataatcagccaccaactccatccatcgcctctccctcaggttcagctctggctgagtgaagatatacttcaaactcttatgatctgtgaacacctgcactttcccgccataaagataagacctccaaatcttcaaggcaaagattaccgcagccatctccaaatcgtgagtaggatagttgccctcatgcttcctcaactaccgtgatgcataagcaataaccttcccacgctgcatcagaacacaacccaaaccaactcccgaggcatcagtatacaccatgtaaggctttccatgctctgacaatgctaacactggtgtactcgtcaacatctccttcaggctcacgaaaccctcctcgcactccggtgaccacacaaaaggaacatccttccctgtcagcttagtcatctgctgtgctatactcgcaaaccccttgatgaacctcctgtaataccctgccaacccaagaaaactccttatctcagtggcattcgtcgttctaggccaatctctgatagcctcaatcttctctggtaccactgaaactccctctgcagaaacaatgtgacccagaaaacccatctctctctgccagaaactgcacttactcaacttagcgaacaacttctcctcccgcagcttctccatcactctcctcagatgtacctcatgctcctcaggactcttagaatacaccagaatgtcatcaataaagatgatcacaaactcatccaaaaactcctggaacacgctgttcatcaacctcatgaacgctgcaggtgcattagtcaacccgaaaggcatcaccacgaactcaaaatgtccatatgtcgtcctaaaagcagtcttgcgaacatctgcctccgctatcttgatctggtgataacccgacgtcaaatcgattttggagaaacaagtagcacccgtcaactgatccaacaactcatcgatccttggcaaagggtacttgttcttcacagtgacccggttcaacctccggtagtcaatacataatcggaaactcccgtctttcttcttcacaaataacaccggcgcttcccaaggtgaagtactaggacgaatgaatcccttactcaacaaatcctctagctgcttctttagctctgccatctctgctggagccatcctatagggtgccttagacaacggcgctgtccctggttccaactcaatcgtgaaaaaatcagaccgtgatggtggtaatccctgcaacgattgaaatacatcatcgaactcctgaacaacccgaatgtcgctcactgctacctgccccaaagactccggcatagatatcgtcaccaggtaagcctcgcagcccttctcgatcattttctctgcctgcactgctgagatgacgagactccctgaggtaggtctcactccctgataaaccaaccttccctctggccgctcaaaagaaactctctcacggtggcagtaaagatgtactctgtaatgatccaaccaatccattttcagaataacatcatacaactctatagggctgataatcaaatctgctggcattgactcccctgcaatctgaatatccacacccctcgctcttcccagaaccgctagaaactgccctccagcaaccttgacggctccaagctggtcaccaggattcccacgaatgttgccgcgcgagacactctccggggtaatgaagcaatgctatgctccagagtcaaacaacacatgagcctctacaccgcccactaataaggtccctacacaaacctcatgtgctaagaaccctaacattcatcacaaaacaatgatatccaaaacaacagaaataattcacaaagtctgagtctcagaaatcatacctgtaatcgctctattgctggtaccgcctatctcacgcgtagtgtaaccctgcggtgccgctgcaatatgtgctaactgctgcactccctactgcacctgcgctccgtgttgcaccgccggctgtaccactgccactgccactgccatctgctgcagcttaggacaattcggcctgagatgttccctctccctgcagtggtagcactccctcgtctcatctcgctgcgtgtaatctgccaccttgtggtcaaggctcccacaagaaaaacatcctgcacgaccaccctattcagctctggaaggatgatcccacttcctcttctgcccctgcgcaggcttgccgcccttgctaggtgccacctgctgctgagtcttcttcggttgtaccgctagactcactcccaccacctgcctctgaaggtcctcctctacctcagcagccgtctccaccagtgccgccttcgtggcgtactgcgacactctacaccgcacctcaaattcggtcgaactcccctcaagaacctcctcatctggatctggtcatcctccatgccccgacccacataaaccaagagtcggttaaacttccggtcatacttccgaaccgaccgctcaccttgtgtcagctcaagaaaacgcgcctccatacggtcgagcgcctcctgcggaaagtacttgacattaaactcagccatgaaatctgcccaagacatatccgcctgcctcctcctggcagtcacactccgccaccacaaatgtgcatccccctctagaaaatgcactgctagatccacccgatactccgccgggcatctgctcgaaccgaagttccgctcaacccgcgaccttcaactgtcggcctcctcaggactagtaccaccagaaaaatatccggtgtcaatcctctgcaactgctccatcatcctcaaataagatggaacctcctcagcaaccgcagccctctactgcacctccgccactcgtggcgcaactggagcctacactggtaccacacctggtaaccgctccaacaactgcctcagcaggcctgccaaaccaacctctggaacctgggctcctccggctgtggcacccatcactcctcggccctcagcaccaaaggcatgcacaccggtaccgacaccagctccaccagcccacactccggctgcaccagctatatcggcaccaagatcgttcctaaccccggactccacaaactcaagctgcgaacccacactctgctcaactgtggccatcactctcgccggtacccttgaggactcgtcccctatcgcgaccacgaccacgaccacgaccacgaactccagctcttataaccatctgcgctactcaagaacaaatggctaagaaactaaaacaaacgaatatatcacaaacaacttaccgtgaaatctcatttaaggctcggagaagatgatgctaggactccaacaacacaaaattgactaaacactccatagtcaatcctcactatgctaacaccgtagctcatcccacatcaatcatcatgaaaaaaattcatcaattaattattctacacatcccagaaccgtgatcgctctgataccaaattgtaacaacccgaccttttttttaaaaaaaaaatatatatatataattaaatattcccataaatatctaattaaaccaaccaataacataatagttaaaccgcaagtcaaaaatactattttatgaataaataaataattcgaccaacaaaaccaagaataactgacaatcctaaccgggttccaataaccaaaaacaccaaaaattaaacaaacgagttcctagatcatcctctcttccttgccatgatttcacgatcatactttatctttacctgcatcaacaacacaatgagatgcgtaagtattatcataaatacttagtgaggcgatcctcccatctacgagctatacacacaagcaaataaaagggtataatcacgaatacaatacaaacaaaccagtcattgaacaattcacccaaaacacattcaccacacctacatatcatcacccaaaacaaatcacacaactcaatcgctcagataagctcatggtcacgcactcaccttaacaaattgattctaatagcaattaaacacatgagagactctccttgcgtctgaaacagtccagaaacgtcctacaacaagtccacaaccaaaagcaaccttgaagcaaactggacaggaaaaaccaaaaacaagcagtctcaaagacgaaaccctaaaatacaagttaaccgttaactattcaatctctccggtgaaatcctagctacagacgtcaaaagctgcccacaaaatctcgtgccgatcggaaaacagactagaccacgatctcagtttcaatctccgctggtcctaattcgcgtctgagaaaacgtgtctcacgaaactgcgaataactcaaccaattttattccaaatccaattctgtaaactggagaataacgataaaggacttgagaataactctaccaaatttcgttaccttttaccacgatttgatatgacgaaactgatttctcccaaaccctaacgattctgctccttctccttttctctctttttctcttttataaacgaaaagtggctaactaaagccctaatttcgagtttccttcttttataggcacactctaaggtttctaattaacccaaccaattaaaccggatgatttaaaaacaaatcctaaccgattttccggttcacgggcgttacagatatatgacgtgtagatcaagaaatgtgtcaagatcctcacttattttttttctgttttcttgttatagtagcaacaaattaacgaacccaacgttgttttcatgtcttcctcaagcatatacgatccaagtcttggactagagatactaagaacattatatcctctgcctctaatgttcttgcacatgtatagagatgatgtggtgggtaaaaaagcccagcccgacctgaacccaaaataaactcgttcaccaaaaactcaactttagaaaacccagatgggtttttgatttagtgggtaaaagccaaaaaaaaccgattattccgagactacccgtgggtacccaacttggtttatgtcattttcttagtgtttatgtttaactgctaatatactattatatgtatgttgtatctatattttgcttataaagtaagctggtatgtaaatatatcatgtaaatttcgttttactgcaaaataataataatttgtatttcaaagtaaacaagagaaacttaaaaagtaatcaaaaatctgaaaatcaatttaaaactgaaatacaaaagtagttgaaaaaaaatctaaacaacatcttctcatactccagaggtacttgctatcgatgtagtaccttcaattccatcattaaagttttcttcaatgtcacctacaagtagaagatataaatcaacaaataaaaaaaaattaagtataaaaaaatgggaaaaatgtcaaaaaaatcgcgaactttcaaatttgggacgaaaaaagtatgaagtttcaagaagacaattaaatcctaaagtttagtttgacttttgataaaataatcaaaaattgttgacttgaccatttagggcatgtcattaagtttccgtcaaccaaacaatcacggagttaactttccgttagaatctctcttatatcaaaacgacgtcgttttgaaaattagaaaatgagaaagaaaacagcatttcgattccatttcaagtgaatcgaaatgctgacattctggactaatagaggatattcaaccattgagctgcattaacattttaatatcttacagacatagtatatatatatctacacaaaacataataatatacaattaattaaatatctgcaatttattaaaaataacaaaactaaataaaatcaacaaccaaatatacacaaatattaaatatatttaccctaaataaatatttggaaatttcaattatttaatttgctatgttagtttcttctatatttgaaaaattattgatttctaaattatataaaacaaactgaaacttggataaattaatttgtatttatattataatatatattagataaatataaacataattactctaacttgaaattgatgtaatatttatagttagatggaaaataaataaataaaaattattttagttacattataagaaaaagtgataattgtattaatggtatatatatttaaatgaaaaggattgtataaacttaaactcacatatttaatattatatattctaatggtttctgttaattttttacattatatatatatacatgctctgtttaccataatacaagaatattattgtagctcaatggttgagtgtctcttataagtccaaaaggtcagctgttcgtttctccttgttagcaaattttccttcttattttctaatgtcctaaacgacggcgttttgatttcacggagattctaacgaaaagttaacaccgtgattgttttgttgacgaaaacttaacgacaagccctaattggccaagtcaacaaaacttgatcattttatcaaaagtcaaactaaactttaggatttaaatgtctttttgaaagttcatgttttttacgtcccaaatttgaaaattcacgatttttttgacatttttctcataaaaaaatagactattctttttttaccttccaactctgcaaaaccacgcaaccaatttctagtacataacaaggcttgaacatttctgggaagaatgcggtttctgaaagggtttaaaacccgacctccaatactgaatgatgactcagctgccactgtagtgattggaatgctaagtatagcagaagctagagaagctaaatcaccatatcgttgcccatcgcctttccaatagctcagaacctccatgtctgtaaaagacctcaaatctagccttggatcatccaaataattttgcaaattggactttgtgttgtcagaaccaggttgtatgctcctctcaagctcaaacacatcctgtatgatatagagtatagacactagttagacaataaagatgatatgatataaacaacgaatggagaaatacttacataatttggatcatcctctagtggtgattctgtaagaaggtcatgtggagtttgggttgttgagaatgtggaagaagtccaaactttttctatgtgctctttgtaaagatccttcaaattgtccacaacaacattgaccttttcttatgaactactcgaatccaccttattataagcagatttaagaatctgcaccttcaaccttggatctagaatagctcctatagctagaatgatattgtactgatcccaatacttatcaaactttacctgcatcctactagccatctcttccactctaagatcaccacaaactgcatagtctttcaaaagacgctcaattttccacacttgcagaaaatacacattagcagtaggatacttgacacctaaaaagtaagtagtgatggtactaaacggcttaatgatgagtaatgaggaaatgggtagacaatgagagcattatgtatattttggatgctaatcttatgttatgagttggattaagctaaatctggataaagatacatgcattattatatgtgtgctattgagtaatcgagagtacatcaaactcagagttttgcatgaactgttataacttcttacttattagcatgttccagaatttatcttattatcttctttgtgtaagtgacttactctgtttgattgatgctaaagtatttttaactgattcgatcagtatccattatctccctaatcgataagagcagtgaaggatgttggatacgagacaagcgactattatgcaggaagctaatctccctaaagtcattacgagctacaacattaaagtggcttaaaaacagctttcaattgattgttttcgttgatgaattataacctcgtaagaataaattcggtttaagaccaaagttaagctctgtttcacttaataagctaagattataactgaaaattgaaaactacacttggtagcttaaccttagccggcactaatccgtttacgagacaactaacaaaatcctagactcttagtcctagcgagttctcctaacaaaaagattagctctttacaacatatatgagcttccaatagacagaagtctctctagctgcctacgttaattttgacacctagcggagcctaagtcatcaaacaacatcatccaacgttagaggaggagctctggcagcggccaacgactttgccttctctttctccagcaaagcttctatgtctgagcacttttgcttctctttctccagttgagcttctatgtcagagcacttctgcttgaagatcttcagctcttcctctagttcttgcatccgagacttaccaatctgctcttccatcttcttttccttcacttcctccaatttacgctctaaccaatccaccttaaagtccgaatctttcaggtatcttagtgctttctctgcctggcccaggtcatcaatggaaatgtcttgcagtgactggcacagtgtatcgattaggctgaggaggacattcatacatgatgtcctcacatgttggttctttgctcggaactctagtgccatgtttgggtgtctttcaaagatacgtttcaccgattccacctacaattgtaaaaaaagatggataaagtataaactcatgtatagtttgtatacgtatccacaaactgaatggttagattataaagatgccatttattccctacattgtcttagtgttctactgataatttctaaacagaaaaagagaccacctctaatccaaagtcagcaacaacaaagaaggaactggtaagacttataagtttgaaaagcatctgaaatcagttcctcctatctaatgaaaagcatctaaaaagtttgaatctttatgaacttgttacctgtgaaggaagaacctgaaacccattgacatcaatgctttgttttacggaaacaccatcatcgtttagccttatccttttcagaggttgagttacttcttgagatccctctgaaacatctaatttgccaataacttgaagaacatcaacctccacaacaatcttgacttcattgttcacaagaaatccacctttcttcgcattaagtttggtaagggaaatcatgtgtcgattcccagagagaacaacgttttggtcaaaccatgtttccgtttctatagacaaagaaaagatagaactgatctaactcaaaacaaacacaagcagacagaaatataaatcacaaaaataggaactttgctttgtccaaaagccttatagaaatcacctcgttgttgggaaagttcatcggaaagttgatttacaacagttaggcgaaatcgtgtgtatcttctccatccacaaggcaatgtttttgaagtagcaaccatcagaaacagagacaaataattagcattctgatatcccttaagaaacctgcaagcaaaaaaaccatagaaaaaatggaaagatgttctcataaaccctaagttggaccaaaaaaacaaaattagagatataacaaacttgtcttcttcttaccatttgcagccaccgataacgaatttatcagaattaatgtacttagattgcaaagatgagaaattcttaatcacccaagtgaacttctcataccccattgaacttcacaaccaaactatcaaagcctaaagttaaggacgaccaaagcaacgaaaccctataacctgactgttcactagcactgacactgttgtgtcgaaccgttcttgcagcgctcgtcttcttcacttatatagattatgggcttcagcccaatcgcattttggccaaatttaacataagtttgtggttggattgaaaatagttaaaacagaaggggtaaaaaggtaaataaacttaaatctcttgaaacatccataggcatagcaagtatcagagagagacctaccctagtccaagaagaagaaaagagtttcgtgttcttcaaaaagcaatcggaagatggtcgagcacttagcgtcaatatacggaacggagaaagatcgcgtgaattgtcctttctacttcaaaatcggcgtttgtcgtaacggagatcgatgctctcgtctctacaccaaaccaagtatcagcccaacgcttctcctttcgaatacgtatcagcagggccggctcaaacaatttctggacccagtacaatcacgagagaaggaccctaaaaaaaaattttaacttaagaaaattacatttcttagttgtgataaaaacgattcctaattaatctgatgaaaagagaacatcgacaactaaaaaaaacagaggacaacagaacatccttcaaaacattcattgcataatcgttcaagtaaataaagcctttctttgtacatgatctgcagcaaaatcatcaatcaacgtcccgatattatcactcctggtgttgatgtatgcaaaaagatttcgaggtttgtaactttttcttcctcaggagattgaattttgggaatgatttatgtacgaagctacttgtttgcaagtatcttcctcgtactgttgacaagtagcttcgtacataaatcatcccaaaattcaacagtaaaaagcattagcatgtcacatgtttcttcttttgtcatgtgtggttcatatagatttcctatgttgtactaaaaccacctgactctcttgacagtggattgaggaggcagttatatggaagatacaaaaacaggcatagccattgcggaagtataggagcccttacaggcattatagtcacgaagatcgctctcatgaaaggcataaccgcagtagaagtatggtcatgatgatggggagagccgtagcaggagcagaagatacgggagcaatagtcctcgccgcaagagaggacggaggagtaagaggagaagcagaagtcctggtggaaggagacagagaagtcctgttagggatgggagcgaagaacagaaaaatgcaaataacaggcaagtgacaattgcaccgatgggtacgtcttgtcaatccttatatctcacagcccattttccgctgtgcagatttgtgcagggtcagaaactctgcttaaaattaattagtttgcttagtttacattgattggttagtttgctctgttttgcatttgggaaaacattctcatttttccaaaactgtattcatcaaatcaactatcttaaagctgcaagtttttgatacgctcatttctgtaattacaaagaaaagcaattttttccctgtgttttcttgagttggtttgtacttcactcagtcattgaatttatcattgtgtatttattatgctagttagggtgtgatttgatgtagcaagaggagaattttgtttgttactcgtagtcatagtgtcattgaatttatttttgtgtgtttattatgcttagttagggtgtggaatcaatgtagcaagtatagaacttggtttggtaaacctcacaccctaactaagcattataaacacacaaagatattgaagttctacatacactacatagacctcatacccgaacaaagcaaacacacccaatggtaacaaattcaaagaagaaaaaaaagacacattacatatatagtgttttttttggtaaagatgttatttgatttttgataaattctttataaataactttaatgttattttttattttggacataattttgttatatttaaggaggtgttattggttatataagactataagttgaagtcacctccattagagcttaaacatcttccgtctattatatatttttatttcattttgtattcgttttgttgacgttctttttccactctttagatttaaatgttgaatgcattttatgtacaacgaaaataggagaaaacataaactcttaatataacattaagcatgaatcactacgtgcaaatttgttagtatcattttcaatcctataatttttttgatatagaattttcaatcattatcaataaaaggtttctatgagccgaatacaaagtagcgttgtgaattatgtttgtcggttttccctcctttagtccatcttctcacatgttaactcttattttgtttgtgtttgtttgccgaataagtaaatagaatgaagagatgagaaaaagaaaaagaaaagagacgacacaagatttacaagttcccaaagccaaaatggctaaggtacgtcttggtgagcttactgaccagctcacaaagtatcttattaagggtttcaatatcgagtacaagaaaccagaaagatgctacacatagagattcaataaaccgagttaaggaacaagatacgttctcctttgcctctcttgaattctagatcttttcgcttgctagtcacgctcactctctttatttttgagggatcagttgcagaggaaaacatagtcttttcttcttgaatttattctttagttctttgagctctataatggcgttgtattctgcagtagaagataaagaagcaactctttctcctacttgacgctctttctttgatgtatactctccttctttggcacaaatcaatattgatttggtgaattattcacagcatgcggcaaggaggaggagagagatgttgcgacattattggagtgtgtttgatggggcgacatgcatgttatcaaacacacttatgtctatcactccatcaaacacactccagtattttatctgactcatacattggatattttatatttaacaatatttatatttagaagatttgattaagaattaaaattatgtttctcgtagctataacttttggttgatttttttaaactgttttgaataatcatataatataaaaagttatttttgttttgataaagtaactttttttaacttaatattgtgattcaaatttttaaaatggacatgtattacctgattgaaaaaaaaatgtgtgtgttcaaagtttcacatcgataaggttgtgtacggctttttttttgttgttgtttgcgttgattagtaattctcgattagattgtgtatggattttattgatcgagtcgtaagttttacggtatttattttttggggcgacatgcatggtatcaaacacacttatgcctatcgctccatcaacacactccagtattttatctgactcatacattggatattttatatttaaaaatatttatatttagaagatttgattaaggtttaaaattatgtttctcctagctataacctttgtttgattttttaaaactgttttgaataatcatataacacataaagttatttttgttttgaaaaagtaactttttttaacttaatattgtgattcaaatttttaaaatggacatgtattacctgattgacaaaaaaatgtgtgtgttcaaagtttcacatcgataagattgtgtacggcttttttttgttgttgttatttgcgttgattagtaattctcaattatattgtgtacggattttatcatctaggatttaatctaggatttaacccatggtgatgatattttattttttattcacaatttattttattataatatataatttaaactttgtattacagtttcaaatttagatgtgtcaaaaaaattaatacttattttgatacattataatgctgatttttagaaaacctacaaaaaattgttattattgtttgttttgtttagtgtttaaaattgtatagttgtaatattatagttttatttatactttaaaatgtaattttcatggaggactcggttggagtttttttcatcatattagttttactgccaaatttattagtgatatatatttttatgtggacttgtgttgtgtcatgtgtggacttgccggaatatccattaggagatctatgttcttaaatctcgaagttatgtgaacttgtcaataaactcacacgtccatcattagtcatcaaaacagtatgaagtgacaaaaacatgtttaatggtgttgattacgaaacaaatctgcatggcgaactacatcagatttaacttttaactcccaaaataatgtataatttaaatcaacttcaaaaatgtaataaagacacattacaatgtctttatcaaaaaataaaaagacacattacatatatagtgtttttgttttggtcaagatgttatttaatttttgataaattctttataaataactttaatgttattttttattttggacatagttttgttagaattaagggggtgtattggttgtataagactataagttgaagtcaactccattagagataaaacaacttctgtctattttacattttgtattacattttgtatttcatttttttacagtatatatatgtattcgttttcttgaggtctttttctattctttagatttaaatgttgaatgtattttatgtacaacaaaaataggagaaaacataaactctatatatactattaagcatgaatcattacgtgcaaattcgttagtatcattttcaatcatttatttttttgataaagaatttccaatcattttcaagaaaaggttttgtttttttttttttgtcaaaccaagaaaaggtttctatgaacgaaatagaaagtagcgttgtgattcatgttgatgaatcatgagttaatacaaatgattctacagctgatttatactgataggatcaggatcacatgaaacgcaaagtaggaatgaaattattataatgaataaaattttcttcaacagtttgtgataacccaagtcagcaacccaaattgttttgtgggtttaggcctatccaatagaaccaacctcaggtttcagttcacttaaaatattaaataagttacaagactaagaagctaaatctgattgtttattagttctgtaatctaattatcattatacgttttctctgaaaatgttaactttttaatgactagtgagataaaaagagaaaactcaatgttacaaccctgtcatcaaaatgatatatagttacgatttcctctaatggaacaacaaaataatggaatcttaatgttaacaaaccaaaaaaacaatctattcttgtgtgcaattagtgctccaccttgaattctattaaaacacagtcaaaaacacaattttagttttccccaataaaaacaaaaacaaaagaaaagttgaaacgcgttcttgttgacgtcgattataaactaaaggaagtaatcaggcaggttaaagtaagaaaattaggaacaataatgccatgtaatttaccttaaaaggctcgttttactgtaacatattaatgtcacgaatacataatgtatagcgtatacataatatttgtaagaatcgattacacgctattatatggtcaagggtagtattgtcattttagtaatgttcagctatagtaattaagtactcttaatctttcttcgttcttctttccaccaaaaaaaatctttcttcgttcttctttttctctttttgatctcgtcttcttgatacgccattgacagagaaattgaacaaacacatttcttctttcatctccttccattcgtaaaggttaaaaaaaacatatttctgctcttaaatataatgtttcttgtttcttgcactccacgctttttgcttctcaatgtcttcaatgtttagtgttgatcgtttcaatctctgtttacaaaggttcaatcgatgagatccttttatctttcttcgtcttcgtccatattatgtaaccttgagatgtatgtgagagaaatcttctttgcgtgtatgatggcgtttgattgagagtgaatgtggtcttgatttcaacattcttaagttttcttgtgcatgaggtcttgttattttctaaacatcaatggaggaacttcctattaaagtaagtacttaagatttgatcaatttagtttcagaagtagtgtttattgataaagtaaataaagatgttcttgtgatgattatttgtttagtaacgacgtcgtaaatctatctacgcaggttgagattctatacgaatccgatcaactcttttcagaactaaagaagattggacagtacatcccactttcaacatttctcgagattctaaaactaaaacttgacggaaaatttgagatactcagagtgaagaacaaagtagtgaaacctaaagtagagggtgaaactattgatgttgtctacactcgcttgagaaaacaccaggtatttaatgatgttaacttgattgaatctcttgatttttcaaacgattttgttctgtttgttaatttttggtgtttgaatgatttatacttcgttattatatgagcaaaacaaggtgcttatgacggttattttctacttttcacatatcgaccaataaaggtattgcctgatgaaacaaagaaggcggactggggaccttttaatggtccgatgaaagatcagggagaacacggtagagtttcaaattctaggttgttttacttatgaactggttcttgtttttcctaaaaatactttgataaatgtagatatatgttgggcgatcgtgacggctgaattagtcactgcgatacggtggatcaaacaacatgaaaacgggactgagtacttgtatcaagagcttgtagattttgtgtttcccgagaaaggaaagctgcaaaaaaataaggcacatttctgttataagctcagcatcgtaaaagctttgaggtatgttgttcgacaaggtattcaaaaagcactagatcggcctttcgatgggtgcaaagagtttccaccgcctcgggttttatcgaattcccacctaggagggtatatttgtgccgccaagttgatacaacattgctacttatgagattttggaagaatgtgaacatgaaataaaatgagaaaaagaaaaataattaaaaaaaaaaatttttggtataatgagaagaaaaacatagtagaacaaatagcaaatattaatgaaaaaatgaaaaacatagtagaacaaatagcaaatattaatgaaaggtcaatttttgtacatatcaaaataatcacaagttggttcattgttcttaatatacctataaatatttgatagaaaaagttattatccttataacatgttaagaatatatgataggatgacttaaataaggtttgacacctctaaatatttgaaaatgtaattctgcaagcaatttttaaagtaatgaatgatgggttgtgcaagcaattttttcattagtattattatatagtataatatatttgatcatgcaaataattgctaaattccgtaattaactaaaaaaaaaatctctatttaacaaccaaagaattagaaattgaaaataaacttcttaaattaactcaacttaatatttaactttttaattaactcaaaataatctacattttagatggggctcatttatgatattttaatttttgatctaactgaattatatgcaatcttattttgtggttgttaacataaatcaactcattgttcaaacaaaattaattttcttcaaaaatatattactttctgttttcatatcttaaaacaaattatccgtaattgagtattatataaaggctcttatataaaaggaaaatatattcattctcatattataaatagggattgacacacaaataaactaatattttttcacttactactataatatatcataactttattcaaaaacatacagtataatatataacttttatactaaataaaacccgtgttgtaaccattgattgaatatacatgtcttcctgttttgaataccaagcgtcgtgtatgcagatttaacaaaaactaacaactagcaagcactttacaaaccatggtacacatatatctgtttttgttctaattatatatccagatgtagaatcgaaatcgttcttaaagagaagtgataatagctggggtgaaaaagaatgtatatatcaaaagatataaatagctagggtttggcaacattaacagattaattgccggagtaggctttgtggaatatggcattattagatttcaatctctatgagtttcacaactatcttcttgatctccacaagcaaagaagaatcagatccgtcgtgcacaaaagcttactaagttgcggaagatataaaagactaagtccaaccatcgtatgagtttcaaactctcaagtacttcagtcacttccacatatgttctgctcttgaacctgtaaaacacaacacatataaaatgcataagatcgaggagcatatacctcaagcaaacacatacaaaacatctttaactgaattgtagcaacttcataacacataaccaactacaagctttataagaaagtggtaaacaaagagactacgggagagtcatttacttggacacagtaaccttcatctagtgcttcttcttcctcagatgaccgttcatcgatttctttacttttactcgtttaatcgaataatgtggccaaaccttatttacgcctttttagtcattgatgtactttgttttttcaattttcaccaaagctaatctcacttctcattagtttatagaatcattagtataatcaataaagccttgctggatcgagtttgtgcggtccataattacatcctttggtacaagttaatttgaaaaatcagtattttgcttttgctttctagtgaccaaactctataatacacatggactagtaaaatctatcgttgaaacgtaattttgaacaaactctgaattcgaaacacaaaaccaaacttagtagcaaactcatagcagtaaaattacaacgcctgaaaactaaaactcaacaaactcaacccttgaaaaaaccctaaaaccctgatttaaatcttcatcaccaagtcatctaatcttgagtttactcatcgcagtaattacaacaccagaaaactaaaaatcaccaccaaacgatttcaaccctaaaagaaaaagaaaaccctaaaacccaaatcttcgtgatctccaagctatcttcatctccaagcaatctaatcttgagattcttttacgtttcttcgcttgagaaattggaaacccaaaaggagactcggaggagaaactagtagccataaaactccaaagaagaatccaaacaagtacatgagcaaaaaagccagagccaagaaaccatagatcatagccaactctttaccaattcttttgaaaccaatggtcttatagccaaacaaagcaacgtcgaacaaacaaaatatgatgcagttattaggtccacacaaataagcacctgccatcattatacctaaaatccccaccgttccacggaaagttactttggatagctcaaagttgtcgaaatcgatgaactcaggcttctcaccaagaaacatcatccacagtgaaatcatcgttgcaacgaggatcatgtcgtatatgatcgcgaatttgatgaaatctgcgtcggatggattcaatctgtaactaaatcccacttgcttcatcgttttaacggagaagaaagatgcgtaatcttgaagaaagtgaagaagaagatgaaacagaacaaaccaaatcagaaaaacctaaaacgctgagattattatatatagtgggggagttaatagataaagagatcgtatccgttgatgagttttaatcgacggtttataaaagtaatctccacgtctgcagatcgctgacgtgtcagttagtttttggtgttgctgggctttccaggcccatttgttttttaagatcagttgacttgatttgatctggtccaattggttctcccaccggttcaaactactatataccaacaatagaagatgcagaatgttgacccttcttcacaattactctcttcctttagaataacgaatttggtcatcaagaaatgctcctacacaatacacttaagacaagctaaacaaactgataagtttggaagaaacctttatagtgtaatagtttctctcggttttattgattagcctaatacgcttatttatacaaagtcataacttaattaacaagttctttacatatgtgataatagaaaatctacctatttaacaataagaatatattttacctttcaagtcgatctcctaatcctctagatctcctaatacaaaccgccatatatagaggtccatgtaagtgcaaaagctcgttggtctttgaaatgaaatacataatatagtgtcaataaatgtacacatacaccttcataagattagctggtgtgaaaaacaaagtacatccatgactaaaaggcataaataaggtttaggccacattaacgataaaaactaaagcctttgtggaaacattaatctatcaaatctagtaaattcggcggcttaaggacagcggttcaggtggagcttaatttccatgtattaatctcgagaactatatgtcccggtttcccatcagtcgttctcctcgaaaccgatttataatcacaactcttggcgttgaagtttatatggaagatggcattactagacttcagcttcatacgcggctctctgtgagtgtcacaagtttccacaattatcttcttgatctccacaggtaaacaagactcaaatccgtcctgcaaaaaaaagcttactaaaagttgaaaaaattgcataagatatataagaagactaaacccaaacatcctgcaaggttcccactctcaagtacctcattatatctccagtaggagaaaagtgcgaattcagtatatagacgtaaccaatcatttgcacatacgtcctgctcctgaacctatcaaacacaacacatcttttttatagaagaacgtttctttcaaagttcaaacacatagaagaaacacgttttacctcgtagaacctcagcttatcatcgtcagcccctagtttggacacaaagttgggcataacacctctgtaaaacttatctattgcttcctcatccacaagacagatctctctttctacaatattaaacacacacaaattcaaacttcacagctacaactttgaatgtttagatatcactagtaatagagtgtaccaggtgttttgggtttgattctgcaaattccagtagagactcttaagtcctctccgttcctagaaaaagatcttgtgaccaagttctgtaaagtgtgagctgaattatcagcaagatcattcacctccacggttatatggaaagacatagcttcaggatattgaacattgtatttaggtatgcgcatatactgaaacttcctctcctacaaagattgaaacaaaagacagtaagacaagatttcacacagttgtcactcagatatgagaatactcaaagtacaagtcacaacttaaaaccttgtcaatgttgaagcaatgaactcccaaacggccataaagagcgacttcgctacgcgggtttttattagcacctagaaagactggtgagattccacatgctgggatacaaactttaccatcaatatcgaaaccctacacccaattttttttattttatcaaaattttgattaaaaaaacaaaagctttccaagaaagacagaacctaaataccaaatcaaagcagagacatgagaagagtaccagagactcggtaacttggcgacagtattcttggtcaagttcttcatcttcctcagatgtccatccgtcgacttcttcttcggttttggataaatgtaaagcatcgacatgttgacccaatccacacaaaatcgagtggcaggtttcgtcagataattttccacaatccaacagctgccgtagaatatcagccatctccgagatccaaagctccaagatttttagggcttgttaactgtttttttttattattattattttgtactaagttattattatgttaatttctgcgaagtatgaattttataagtattttgtttaaagcaaaagcaaagttctcgtttcttttcctggattttgaatcatcaccaaatttccattcacatgaacagaacgtaaaatttgacaaagcaaaacatatctcattgattacctctttgtttttgtatgcaaagcacagttttccctcgtagtggcttgaattcctctttcaaaataacataaaaatttaccaacttgttaaaacaacatactgaacttaaatatgacaaacaatattgaagcgaaatgtttccatggattatgtggtaataatatttcctaaaccgaaagatttttgataatatgagtgaatcacctcaagaaaccttggacattgcaattcaagaggaagaggcgtggaggcgagcaaaccatcaagaaaatccccaacccgagaggaaccctatagtgcaagtgacgccaattccagcggatagaccggtatgctttattgacgagtcttggcatgcgacggaggcgaggagtggacatggttggcttatttcatatggaggtagattggtgcatttaggactaaagggatcacgtaggagtctttcccctttgcatgctaaaccaaaatgttgtgttgtgttcgagggtgttttgagtttatctatgtgacgtgttttttttttttgtatcgtgtttcagtttcacgtgtttatgtttgaattttgttgtctttcggtgtgttttgaatttaggtgattgcatgtatttgtaattcgtgaagttgtgtgtttctagatagtttgaggaaccaaaacaagccaagccacctaggctcatcaaatgagaatagaggaaactttaggaagaatacatgagaattgagcatatacacatgagaatagaggaaactttactttacctgacttctcatatgctgttgctgcaaaatcgtctctcatttgttcttggcaaggacctttgttcttttcagaataaggatccactctctagaattcaaagaattttgttagcaaacattatgtgcagagcaaaacaggatccttacacaacatacaaataatatataaaacactacaaaatcaatgccaagaaaaaatatggtaagaatcttacagaggctgactgatttttcatctcttgttctataatcttcacgaaacatgttgtataacgaaaatcccgaatataaaacataaccctttaagttagaaaatatcaagagaatgacaactattgtaagaggtgataaaaaaatttaatcaccttagcactgaagaatatatttgttgtctcatatgcacgagactttctaacaagaagaatccgatccctgttttccttagtattgtaccatgggaataaagatctagtagagaaatgtgatatgccttattagttcttccaagttgaaaaccactcaaatacgtcagacatttccaaaaaacattgtatcagtgtgtgtaaattatatacctggcctttcttcttttgaggagactatatggctttcttaaatttggttcttttccgcttaagaattgtatatctttctacaaaaccattatgttagcagtatatacacaagaccataatttgtttacaaaaactctagaaaaagggatgaagatagtttatctacctgatccttcctttttccgagacaattgaatcactttcctaagtttagttattttcagcttaagagttctccatcttgatacaaaaccattctaatagcaattactaagcatataagactataaataaaccacataaataatgctaatcaagaaacttactggaatttattaagtctgatccaagctaggattcgactgctttgctcttattgtttctgttaatctagacaaggaaacaatgtccacaaaacatgtttattacgtatgataaatattctttgtgaaataagtattaataagaaaatttgtatgacgaaaaagtaaaagagaagaaataaagaaacttcaccttgaaacttgtgttttactttggattttgaagtatcactgagtatcccttcacatgaaatcacatgattaaacaaatctaagtaaatatatttatttttgtatgacaccgtttgagcttgtgtggcttggatttcacttttagagtagcataacaagtacttagattcaatgtgaccaaacaatgattaatagttgtaaaaaactaaaaaagaacgagaaagaaatttcccctgaaattgacttagcaacagaatcacaaaatgttttactgtaaggaaatatattgattgtttttttgttctctcatgtgtctagttttttgttgtgctgtattttatttcttgtgttatgttgagtttgagctttgtttcgtgtgagtatgtctatagttttgttgcgtgtgatgtgatttttttttgtagagtttgatttttgttgtctttgggtgtgttttgagtttgagatttttccgtgtttgtgaaagtgtgtgttttcagatattgtgagtaaccaaaacaaagccaagatagctatgcatgacacaattgacatgagaataaagagagagatacctgacctcccacatgctttaccttcgaaattttttgttctttggacctcaaagatatctccatgaagcaggacacacaacccctcattttctcttgactactgaaccaaaatttcacctgaaagtacatcatacaaataggacaataaaatgaaacgacaaaatcattgccaagaaagaaaaaaaaaacatggtaagagtcttacagatccaaaatcttactggttgctaatattttctacttttaatcttgacggaaaatgtgttaacaaagagtacaactgaaaaacataactatcaaagttagaaaaacaatcacactttaagaacacattaaggagactgcatcatcttagaaacaacacatataatttaaagagtgttctaaaacttacatcaatgttctcgtctccaaattgagatatgaattgccacttgattgctgaatcatatgaccacaagactgataagagttcgtaacataaacatgcaattattgaaacacggaatatcgagataaacaatgtatgtgatgccatataatcttcttgtatgaatataacaattgaccattttttccaaatcaatcaccatagaaacacataaacacagtgatagactaataaccaaacccattagtccagattatacgaataagatggcttctttaaattcgaagacagagccaaaacgatcaaatgcaaaacattagtttgaataacccaaacaagccaaggtatctcatcaaatgcaaagaacctgtagggacaaatgtatgagaaaatacacaagagaagagaggaaaataattactttacctgatctcataggctcttggctagaaatcgaccctagaaatgttgttatgtgcagctgatagatatatgacctctcgtttgctcttggcaagaaatttgttctttgtagaataaagttccactatctagtatttgaagcattttgttagcaaacaagagaatgtcaagttttgtaagaggggataaagaaaattagccaccttagcactgagaaaatatctggttgtctcatgtgagatagactctccaacagttagaattcgatccctgactgcgtttgtatgatatgtacttggaaatcgagatctcaaacagaaatatgatatgtttgattagttcctacaagttatagatcacttaaacacatcaaacattttcagaaaaaaacattataaatgtttacctacctgacccttgtactttcacagagactgaatggctttcttaagtttggttcgtttccgatcaagaatcttctatcttggtacaaaaccattatattagcagtatacttaatacacaagaccatataaaactacaaaaagtttgaaaagagacaaagatagtttgtctacctgaccctccttttaccgaggcgactgaatcactttcccaagttattttcacctcaagagtcctcctccatcttgagacaaaaccattcttatagcagttactaaatacatatgactattaaataaaactacaacaatgctaataaagaaatttgcaggaaatcttactaactaatccaagtggggatcccactgcttggctcctactgtccacatatgaaatattgaacatgttgatataattatatgcacaagactcaccaacaacaagaatctaatccctgatttcgttagtactataccttagaattaagatctcgtagagcaatatgatatgcttagtagttcatgcaagttacgaatcactcaaacacgtcagatatttcgagaaaacattgtatcagtgtgtgtagtttatctagctgacccttcttctttcgaggagactggatggctttcttaatttggttcaagaatcgtctatcttggtaataaaccataatgttagtagtataatatatatacaagatcatagaaaaattacaaaacctctgaaaagggattaagatagtttatatacctgatccttcttctttccaaggcaagtgaatcactttgaacatgttggcaaggaaacaatgtccacagctgagatattgaacatgttgacaaaaacagttgttagcttggttgtgaagtatgtattaataagaaaatgtgtatgtagcaaaagtaggtgagaaaaaatcgagaaacttaacttaaaagttaaaactctagtgtttttcttggatattgaatcatcattgagtatcccttcacaagaaatcacagtacgtcatatctaactaaatatttttattagctctttacttttgtatgcaggacactgttttcgcttgtactggcttgaatttcactttgagagcatcataaaaagtaattagattcaatgtgacaaaataattgatagttgtaaaagacaaagaaatgagaagagaacgatacttcacttgaaatattgacttggcaacaaaatctcaaacttcttaccaatacagaaagatattgatcgtgaagttttgtttttttttgtcccttttttggtgtctacttttgtggtgtgctgtattttgtttcttttgttatattgtgtttgagtgtgtttagatttttgttacgtgagatgtgcttgattgagttttgtgtgtatgtttgagttttgttttgtgtttgggtgtgttttgatttttgagtgcattgtggtggagtaatttttcgtgtctgtgaaagtgtgtgtttttagatagtgtgagtaacccaaagaaaggcaagacaacttggctaatcaaatgcaaagaccctgttgagataatcctcagaacttatgcatgacttaatagacatgagaataaatgaagcgatatctaacctctcatatgcacttggttacatattcaccttcgaaattttttctcttgacctcaaaataatcagcaagaggcaggaaacacgacccctcattttcctcttggctactaaaccaaaatctcacctgaaagtacaacacaaacaataaaatgaaaccacaaatcaataccaaaataaatataaaaaacactagataagagtcttacagagagccaaaatatgactgcatgctactcttttttacttgtaatcatgctttataatgatacccagctgaaaatataactcttcaagttagaaaaacaatctcactccagaggaatataaactgcaaaatgcttgaaacgcattaagatgtcgaaaagagaatccaaccatcatcttggcagcaaatatgatttaacagtgtttcaaaacctttcaaaaaacaaacatgacaagatcataggagatgtaaacaaaagtttaagagcaagaacttaagtaaaagcaaatacaaatatataacaatggattttcttgcagtaaaatcaagcgtagccttacattttttgtccctgtagacttcgtaaaatggcttcttgttgctaatggcagtattgtaccttggaaattgagatctatatgatatgcttttttagttgatatcacttaaacacgttagaaattagtagaaaaacattgtatcaaagtgtgtttatctacctgacccttctttttacggagagattgaatagctttcttaaatttggtctttttccacttaagaatcacatatcctggtacagaaccattatgttagcagtacactatatacacaagaccattagaaaactacaaaaactctgaaaaagagatgaaggtagtttatctacctgatatttcctttctccgaggcaactgaagcactttcctaagtttagttattttcagcttaagagtcgtccatcttgatacaataccattctaatagcagttactatatacataagactgtaaaattaaaacacaaaataatgctaattaagaaacttacagaaaatcttacaaattatgatccaatcccgattcgactgctttgctcctgttaatcttgacaaagaaacaatgtcaacagctgatatattgaacatgtttattaagtatgaaaaaaaccagttgttacgattggtttgtcgtaacgtatgtattgataagacaatttgtatgaagcatgagcagaaatagagaaacttcaccttataactgatatatctgatgcatggaaagagcaacatatctgatatctaaataatcaaataaattccgtatgtaggacgtttttttgcctgttgtggctttgaatttctcttttggaatagcatcaaagtacgaaattgctaacaaaacatactaagcatcactgtgaccaagaaaggaaagaaaatgagaagaaaaagatacttcacctgaaattgacttaacaacagaatcttaaaaacaaatattaatcgtgaagtattgttgttttctttctttcttgtctctagtttgtgctgtattttattctttgtgtttgagtggatgcgtttgagtttgcttagagtttttgtgctctgtttgagttttgttgcgttttttgtgtgttttgagtttgagtgcattgtgtttgttgtgtttgttgtgtctgtgaacgtgtgtgtttctagaacttatgcatgacagaatatacatgagaatagagggagagatatctgacctctcatatgcttttggctataaaaatcacctccgaaaattttgttctctggacctcaaagatacctacataaagcagaatacacgactctcatttgcttttgcttcttgaaccaaacttcacatgatattacggcacctataatcaatgaatgaaaccacaaaatcaatgccaagaaaaaaacttggtaagattcatacggtactaaaatctgactgcttgctaatcttttcacttggataatgttgtaaaacataactatcaaagttaaaaaacaatctcactcatgagaacacataaagataatatatagaaagagactccaatgcatcatctaggcaacaaatatactttaaaacaatgtttcaaaacttacagtaatgttcccgtctccaaattgagatatgaattgccacttgatagcctgaatcatatgaccacaagactaattagatctcgcaaatggagacataaacatgcaaataagaaacataaattcacagattgttcttgcatgaatataacaatcaaccattttttttcctttttcaaaataaatcttcacaaattcacagataaagacagtgatggactcataatgacgccacaaccaaagaaaaatccattagtccagattatgcgaatatgattgcttccttaaaatcccaaaacgatacaatcaaattcatggacataagggaacttctctaaatcgttggtttttttaatcatttagactcatcaatttcaacaagtaagagagaaattttgatgtagactctgttcaactgtttcagaacattcaaattctccgatcaccaaatttaaaacctatcgaataagttagacattaccctaatagaaagatcccagaaccatcaaacctctaaattccaacagaaatcaacggaagcaaattccaaatccaaaccctaggatcccaaattaaccaagaagagagagagagatcgaaacgttttgtaccttcttcgatttcgtcagaatatcaccgacccaaaatcaaaacccttggatcccgatttgaattgacccaacgaatcagagacgcaattcaattgatcagagaaaagaatcagaagaagatagaaaataaaattcgcttctccatgcgattatgtaaaccctaacgcgttattctcaaagatcaaagaggatttgaagaaatgaattttgaaatttcaactttcgctgaccgttacttgtggaaggggaagagttaacgttgcgaaatagagtagtgaggccagctaatttatctggttcttttgaaacaatcggcatgttaatttacgattatggccctgagttttcaaaattttgtttcccgcttttgagtttttttttgttagaatctcatacgtgctagagtagtttaaacgttttgtaaacctccaagttggaggctccaacccaaactaatcccttggagtttagattaacaaagaataatgctaaactataaaaaaaacaggaaaattaaaaaataacgttgaaaattaaaaaaaaaaaactaaattatttaggaatttttttactatttcttttaattgaaaatatgatatatctaatgttttatatttagatttatcaaactattaaaacgaaattatatatatatataattattaatgaaaattttatcattatttaattggaaatgtctatttttagattgattttattatatgtttgaaatatattttattataatgtttttattttttctacaaatataattgattcaatttaactatgttatgaaaatataaattaataattttaaatatatttttggaaactattaagttgtaaacttgtaaatataatttagaacataaatatattcagtttagtcattttgttattaatagatacatcgaaatggagatgcatgcaaatttacaaaaattaaacaaacaaataaaataaaaattaatctgttaagcatccaaatgcacaaccaaatacagaaacaaacacagattgaattcatcatcttgatatagcatttggatgcaatctagatgcacaaacaaacatcaccttaatacgattcgctacatgtttataaaccattgattcagagaagagcactcactacataatgaggaatgaattttacatctacatgtatctacccaagtgttcactctgatcaaggttatgaagaataagaaatcattactgcttttggatacaaatgtcgaggatcacagtcttgttatattcgaccctaaaatgaaatcctacgtacaatttatgtttcacacctggttattactcatatgcactttcttgtaatcaaagcttgatgtcaaccttagtcgtaattcatatgtcaatctcataaggattataattcctgctgtttaagtattttcttttatatatttggtctccataatatctttttgtcctcaaccttagtcgtaattcatatgtcaatctcgtaaggatttgctttgttgtgctgaagtaaatccgcaagtttctcttctctaacacaaaataaaatcacattagtcatcattcccagcactaaactactgtattattctacaccacttgtctttacattaacgacatttacagaagctagattggtaaagtggaatgttagtgtcaatagtaattacgtttttgtgtaagaaagttgtagaaaaaagggatcattttttccttatgttcatacttcatactcctctaaaatctggtaaacactcactcgggaaatgcatggtcttcgatttacgacaagctggtagtctctaattcccttactcatgacctcttctactccatgctgatctgactccacgattacattcgtttgtgttgaggtacgtttttcatctctttatttagtctttggcgagaacggaatagtaaacggaatggtgagtcacccacactagcctcaaagcttgcaaaacttatcgataagaattgtacgaaaccggctaagaactttggtaaatgactgggtcaactaaatacaaaggcaggctgccatatatattgatttcgaaacccataatcgctaatgatccttccaagttgtaatactcttctataacttctttattttgcattcattgtaaaacccttttttgtgaataaaattttacatcaaaaaaaaagacaaaacaaaatcaccacgaaacgattcaacaatagaaaaaaacctaaaaacccagatttgaaccttcatccccaagcatcaaaccttgagattactcatcgcagtaattacaacacctaaaaaccaaaaaaatcaccaccaaacgattcaatcctaaaagaggaaccccaaaaaatccatatgctgaattaagttgaatcttcatctccaaggaatctaatcttgagattctcaaaaggtaatggacttggcgaatcgaataaccaaaagaatactcggaggagaaactagtagccataaaattccccagaagaatccaaacaggttcacgaggtaaaaggccagagtcaagaaaccatatatcatagccaactcttttttcaatccttaccaatggatcgttaagctcaagcaactcagatacaatccagcgtaaacttcccaagtagtaaaaataagccatcatcagagtcaaaagccccatcgcctcacggaaagttactttcgatatctcaaagttaacgaaatcgatgaagttagattctccccagatcctcagcaacatcagcgttacaacaacgagaacgttgaatttgagcgagagtttgttgaaaactgcatccgaagctatccatctgcaagtcaatcccaatttcttcatcgttaagtaacagaagagaaagaagcgtaatctttaagaaagtgaagatgagaagttgcaagaagatatttggagatgaacagtggttttataatgttaatttggtgtcggttttaaagaacgttagggttttaatttctaggcccatttgtttttaacatctgttcgtgaccttatttgaccaaatcttcttgtattccggtttggttagtgtgaattaaaccagctcgagtctttaattttggaaggacagttcatttttttttctaaggattaaggagagtccaatttataatttgacaaatcaatatattttgctttcgctctaaagtgttttacttagtggcagaatcatagcagtacaagatctgaaaccaaactcactcaacaaacaaaacgattctatccttcaaaaaaaagaaactaatccccaaattcgaaccttcttctccaagcaatctaatctcgagattacaccaggaaactaaaaatcaccactactaaacaattcaacccaaaaaaaaaactcttcagttataagcagtcaaaatccaatggaggaaaattgttgaaccaaaaagagaaatggaggaggaacaggtagacataaaactccccagaagaatctgaacatgttcatgagaagccaaagccaagaaactaaaatcatacctatctctttttcagttctttttttttaaatcaatggtcttttcgccggacaaaacagcgatgaacgagtgatatatggtccagttatcaggtaagcacaaattagctaacaacatgaacatagtcaaaagccccatcgtctcatgaaaagttacttttgataactcgaagttgttcaagctcgtgcttagatagttgagcaagtatgcaaatcatcaagcaaactctttaataacatagactatagtaaaatctgaattcaataaatctataccaaactcatgattgaagtatttacaacaccagaaaaaaaccctaaccgtagatttgaattttatcccgaagcatctaagctttagattactcgtagcagtaattacaacacctgaaaataaaaatcaccaccaaacgattcaaccctaaaagaaaaaaaagaaaaaccctaaaactaatcgttgtggttgaatcttcagctccaagcaatctaatcttgagattctctaacgtttctgaacttgacgaataaccaaaaagagaaacggaggagaaacaagtagacataaaactccccagaagaatccgaaaaagttcataagcaaaaagaccaaagtgaagaaaccatagaccgtagcaatctctttgtcaattctttcgaaatcaatggtcttaccatcgtaccaggtagatactacgcagtgagttgacttatagcaacaagaaagtgccatccactcagctaaaagccacatcgactgacgaaaagttaaattcgataactcaatgtttacgaactcaggatctctcgctcgacccatcatattatatagtataagcaccgttgcaacaaggataacgttgagtgttaacgtgaatttgatgaaatactcgtcggagggaatcaatctgtatgtgaatcctctttgtgtcatcgttttgagtgagaagaaagatgaaaaatcttgatgaaagtgaagattgaagaaattttgttgagaaaaacctaaatcgaaattacgagtttacgtgatcaatataatccaattaggtgtcggtttgaaagacaatgttagggcttttctaggcccatttgtttttaacatctgttgaccttatttgacccggttcaaccggttccccaatattgttgtgttccggttaagttagtgtgaattgaaccagaatgattctttattcatttttggttgggttttggttctgtaaaatctgaaatcataaaaagatattttgatgatgctgcatcatccacaaacaaccaaaaatcgagatcactacactttatgtagaaaccaaaacatcacaacttttttttccctccaatttcataattccttaaaaatcgagatcactacacttgaataagagagtataaaaggcagcatgaacgacctatataaaccacatgttaagttgttaactacaaattaactttagcaaagatactagattgttagtaatcagaattatcaaacattaaatatactcattgatgattaggatttgaagacttcatatgtttattttaaaggataaataaattcagtaaaataattttgtgtcaacatgtttcagttttgaataatagtattttattttcttaacgataatgtgatcatgtttacacaacagatgtctttgtaatttgcttttatcttagtttttttttgtgtgttttttggcatgttttacttcaatatttaacaaattttacatgtaacgcttatgacgtggccacattcactaatcacaacacgcaaaaatcaaaacatttgttcctaaaacgtaatgtagccgttattggcattggcgagaacgttagaaatgtgccacgtggcttatataatgtcagtaaaaaaaaggtttctattttttttttttttttttaataaaaggttaaattttataccattttcatttttgacagaattacagggaaaacatgaaacagattaaagcaatctacagaaatataaagacaacattacaactcaaattgcaaaggatcactgctaagcggtcaaagtcaagttgtaaggagaaacacagattccaaatccgcgaaactcgaaaatttgcgtggttgccacagaaccaaataactggagtcctcatcttagttgccacgagcaaatctatgtaaggcccgttcacaaaacctcaagatagaagcctacaatttctccgaaaactaacgcaaaaacgtataagcaatcatggacttctatgctatctgagatagtatcgccacttagacttattcgccccctctattctactcgacaaacccaaccaatacaccaaaagctaaccaaagcaacaaaaacataaaccgacaacaccaaaacaacaaaactctaccttaaagcaaaacggagaagaagccacggggacaaagacaaacgggcacggagaagctgtacccatggctgaagaagctaccaccttcaacaacccaccaaaggaggagacacgatgaccaccaacaaccagaatccccaacgcgtctaaccgcaacgaacaagccaagatcacaaaagtgaccctgaggcttgcctccaaaggagaagcccgtcggatccagcgacgacaccaaccggagctggagaaaacaaggatagagaggcccgagaaaagaagaaccgtcccatcaagacaatccggagagtccgcaccccaaagaaacaacgacgatgactgaagaacacggcgatgcaccaccggtttctcaggccgagcgaaaggtcctgccgctaggagctaaaccgttgaaaagacgcctcatcggagccacgaccagaaactacgagtagctcgccgcacgagagcagaaaaaagctacacactccggcgaagaaccctgtcatagcaccgtccacaagcaccgtaaacaagagctcgacatgagacagtagcaaactgccccacaagcgaaacttcttgcggcaacaccaccatcaagagacgaaaatccaaccaaggtcagagcaccaccggatcgacaaagacaacacggagaagacaactagagaaagggaaagaagagagtggtcctctccggcaaacggtaaggaacaccgtcgccggagaggacaaaacgaattttcgatctaggtttcgctctttcacaaacgagagaaaatattggggtcgcgtgactcacacgcacaaaacattactaaaaacggaaaccgggtttctattattctctttctctgcgactctttcatcggcgattttgaaatttgctctgtaaattttcgttcgaattcttcagtttcatctgggttaatcctgttttcgtatatataattttgctttctgaaatcgatgattaatcattatcttcattcagtaatttctgtaatcgagagtttcaaaatttcaaaatcgcttttaagttctttctctcgttctctcttcgatttgggtaaaattaaacaaagatttatataatgctcttcatcgaattaactctggcttccaaattctcaaaaatcggttttcttttaaaatctttcgatcgttttttatttcgatttactcgatttcacttcaaattaattgaagatttgtgtttctgattctttgaattagggttccaatttcagttatcgtgaaattaattttgagtacagttaagagatcaaagacttgtatattcatctaacaacgttttttttcttcttatcgttgcagatctagttcgtataagaagacagagactggattcttctctcatcgatcacaaagagtttctcgataatactttcacaacagtctacatactcttcatgtaattctctcaactgtggtttttgtcatgtgcttctcctatgtttgtattagattggttgatatagttaccaatgttagaaatcttatgttaacaagcttctacttttgaatacctgagcaactgattcagtggaatctatttgacaatcactctccttagtgcagggtataaagtgaaaaagataccttttacttgtttagtattgttacgaacatttagatgtgagaatatgattttattggttgttttatggactattatgtggaccatggtttatgctttgaagctatggcttgaattttgttagttgcgcatgatctgtacttacttaaatctgtgtattgtatggtctaatatgctgacttgaatatgtgcttgtgtggtttatggtggtttatgctttgaagttatgacttcttcggttgtttgttgtgtagtatttgcttgctttgttacatgggttttttcttaccttaatctctgtgttgagtagtttagtgctaacttgaataccttgtttgtttgtgtggtttatgtattaattaaaaaaatatgatattactaactttgaaatttatgatgaactcgaaaagagatggttattgattgtccttggaagattatcttacttgatttgtaatgatcgcttagtagtggtttgatatgagatatttcttttgttatgagtgtctgagaagtgagaaaaaatctttagtgctcaattacaattttcgttgatcaacaatatttctacagattactataaattacaattgttcatggatttacattttaacaggtactatttcatttttaaatgatcatgctttattttgcccaattccagtctttcaagtttgattgctctgataatttcctaatagaaatcagtagtttctggttttgtgttgtgtttcttcgtgtgtgaagctaattttgtaaccgtggctgatactagttctctggtttcttgaaagatttcaatttctttgttagtaattgtttccagagaaattgtttattatgaaatacttgttggcaggtttttaacctttggggttaaaaaaactggtgaaagactcctgtcaatgtttcctccaaaacatgagccttgtgaaaatgattggcaaagatagttgttaaaagttgaaagccgataaagaaccacgctataagcttgagtctagtaatgcaatcatacaatcatacacttagcattaagagcagtgaagaaactagaaccgtaataatgaaaacagaggatatttgttcttcaaattagttgctggcttaaaggattgatcatttttaatgttgtgaaaccttcatttattcttctaataaactctgctattggccaacagatttgtggaaacagaaaatggtgaaaacgtgaatctaaaattaacacatttgagccaagatagaatgttgaaatatagtggtaataagactccaactggctctctttcattaagactcttgttatcaaaagaaaatataagaaaatccgaaggtttcataaagactacaggcaaaattccatagaaatcacaagctctaataagaaaccacttcacttggcagcagcgtgcttggccttgttgtgagactcaagtgcattccctgagttgaaagtcctgccaaagagatataagccaacaagcgaaatgttataacaaacagaaattttgagcagtgaagacaagagttagagaaagagagagagtctcacttcttgcatgaaccacatgagacttgactggccgactttgggctctggtttgcagcctttccccctttcttcttctcatctgtgccaaagaagacgatgcaggttcaaatgaatactcgtgtttcccaatttagtgaataatgtaagagaatggtttgtatctatacctgttttctgaggagtaactgctactttcgccttctttgctgacacaggtgctttaggggtagtttcattagctctcttcttgcttgatgcaggcttcttaggtgtaggctcttcttcctcagaatcctcaccatcagaatcatcttcatccatctgcaagaatcataacacaagaatgcgtcaccaacatttgttcaaaaaagatgtctcatctcctcagtcattattctgaaatggtaaacaaaaagagacaaatcacagaaagctataacaactcactccgtcagaatcagactcatcctcttcatcatcaacagctggcttcacttctgcaggcttagcctttggtttagctacagccttggcagcattccctgcaaatggaactagttattaccaattatcaggatcacaaatcaagtagtctctgtctagtttaagtaccagcaggaacttcttcctcttcttcctcttcttcctctgaatatatcaatacaacacataaacgaatcatcagcaaccaagccaatattacagttacaaacagaataattgaattgaaacagattttatcttgcaaactcaccagaatagccttgtggctcaatgttgggagttttgtatccaacaaagtaaacacttccttttccccaagtgtgagaaagctcaaactccttgtcgaataccaaatcacagaaaagctgagggatgttctcagtcgatagagttcccagaaccaagttctggttcccaacctttacatgtaaaggcacaaactctcccttcttgtttttacattctccaagcgatgcctacacagataaacaatccaagattgtttacactagacctctaacaactctcagaatcaaaatcaataagatttgatactaaacctgagaaacgtggataagaatgccttcttcaggagtcactgtaactggctttcctgatttaacttcaattcctgattacatcgttttaacaaaaaccaacatgagtatcaagatacagcttcaagttatacactaccacactaattcctatataatataaccatttctatgtgagaatattgcaacttaaaaccctagatgaagctacacaactacaccacacaaggaagcagccacaagagagttcgaaaacagattttaagaaaaacccaaaaagcttcagacaaaacagagaagattcttaccccagaactccatggctaagaatcaaggttgagaaaaagagaggatttttagggtttatgagcagctgaaaatgtaagagaagaagaaagggttttaagagattatttataagacagagggttttaatacgaagccgttttagggttttaatacgacgccgttagggtctttactctttagggtttttcttcagtactaacgacgtcgttaaagatatgaaagtttgtgaaaaaacaaaatgctccgatcaaattcaaacggcggaaatcagtataggcgaaatcttcctccgtcgaagctcaggggaatgtcttcaagctctcaaggcttcacgattgatgcagccatggagctgctgatttcgacaaaatgtggttaatactctcgagcggcgtttgttctatatcccttctttcaaaatcaaccgtgacgtcgccggactatttgattaaggattgtgctgttaaatccaatgttcttagcttctggcgtcaagtaagtacggaacatcattcacctttctcttttgagtagaaattgagacaaatttgacatgattcatagagaagagtagagattgttttaggtttgttctcagatagcatttcattcttaaggagaatatgtatgaagtggattgtccatgtgtgacaccagaggttgttctcaaggcatctggacatgtagaccagttcactgatctaatggttaagaatgagaaaactggaacttgttacagtgcggacggaccacttgcttaaggattattgctccagacacgaagaacactctaacaaggcatttttgtgaaggacttgtattactacaatgggaggaaatttccctttgctgctgctcaaattggtcaacctttagaaatgaggtgattatcgtttaattttctattcctttgcttgatagattggatgtgtttatctcaatcagggactcttttttctttcttttatgtctggcttttaataagtgacgcatattacttgcagatatctcatcgtcaagggcttcttagagtttgtgaattcacgctggcagaaattgagcattttgttgatcctgggaataagtcacatccgaaattctctgatgtagcaaattttgaattccttatgtttccaagagaggaacaaatgtctggccaatctgcgaaaaaactttgccttggcgaagttgttgccaaggtcagtatctgtaatcatctgcgtctacttacttctagtatgcactccctcagaccttttgtttcttaattgcttattgatgcctgcaactgtatttgaatagggaactgtgaacaaagaaactgtaggctacttcattgcgagagtgtatcttttccttgtccgtcttggcacagacaaggaacagttgcgtttccgccagcattttgcaaatgaaatggcccgctatgctgcagattgtttggatgctgaatttgagagttcatatgggtggattgaatgtgttggtatagcagataggtctgcattcgacttacgtgcccactcggtaagaaacttacttttatcttgtattttcttcatttcgtttgacagctagagaattgatgatcaaaacccgtaggtaggaaaagttgctctgtggctgagagaaatttccagaacctaaagaagtagaggtaatcaagtcaacatgttcatctctgtctctatagcttgttcttaatatgggttctctgttatttcagaaacttgtgattactcctgtgaagaaagaactggttcttgcattcaagggaaatcaaaagcatgtcgttaaatctttagatatagagtgactgaaatctattgttttactgacatatttctttgtctcatgatgttggtttacattaaacaacatgcttcgtgtaatgttttgttaggcgatgaatgagcaataagctatggagatgaaagcaatcttggaaaccaaaggggaagtagagttttacgtatgtaccctaaagagaaacgtgagcatcaagaagaatatggtgtcaatctctaaacacaaaagaaactgtaaagtaattcatgattagattaaactagagaaaaggttcaaaatctgttttctagtatatgccaaatttgttttcaaacaaatttcgcaaaagtaatctgttttctaaaaaagtattcaaccattcgaatgatctcaaaccacctccaaataaaactctctcagttttctagtatatgccaaatttgagctccatccagcaatgaaaaatctctcatcacatcccatatacacatacttatgtcgataacatccccaattaatgccccccttttttttttctctaaaagcagtttggaacttgaatgaatcgatagacaactatgtacacataaaagacacctaaacactacaaatggcacacaattagaaaaagaaaaaaaaaaactaaaaaaactcaaaactgatcaaaactcaaggcattagtacgacttttgagaaattttctaccacgatttcaaataaaataccaattttttcttatctccaattaacacacataaaataagcaaatatttattttatattttttatcttcagttacgttaattattatacacataattttcgtttaaatcatacattatttcacatgtgaatgactgatacaattagattttgtatgtagtatcagtgtgagcaaattctactcagctgttagattattacacacattgtggtaaagattccatagaagtaagtggtgtcttgtccttgtcgttgctaaagcgattaagctttggggttagggttggtcttggtctcctcaaggcgtacgtgagtctcccaaaatatgtgattttataatcatcatacgtatatatacatcaaattatgatccatcattcttgatcaaaatggacaatttttatttttttaataatataggtctatgcagtcgtcattctatgtgacttttcaattgtacacatatacgtggttgcaaagttagcaattcccaaaaacttgcatgtgaataagtcattttttgtttgttgtgcacaaatccatatacattaattatatcaattataagtgtctgaaacatttttgtgtgtgttatatatagataacttgaaactctaatatttatattcgtcttactggtttataatgtttgaaagataatggaacaaaacagcatcgttatcacaatcattttcaaaattcactagaagatattggtgttttaaaaatctaatacatgattacaacttatgcagtggttatggccatgttaaatcatcctgtgcaggtacatttctcgcctgatattaaaaaaatagattatatatagaagctgaagtcgtaactctacaatttgtttcagttttgacttttgataatggtaatattaattatcaattttatttagccaaaagaaaattatcattgttattaaaaccaaaagaaaatttcatgtgtattattgtagtctagtttccaagtcatttaagagtgcgcaataacaaaagaaacaacaaatattaaaaatgcaataactcgaaattaacaaaacaaaaactaatagtatctatataaaaataaccaagataagaattattaataaaatgaaacgctcgtgcttgcatgctatgtttgtaattcgatttgaccaatgggtaagactttgggtcacattggtaaactgcaagttgaccacaaaacttgtacgtatgagagctataattaatataaattaccaattaaataaacacacagaaatttgaccatgtaatcatgcactgttgtaccgttgttaccttcaattacttcgtactacttgtaactattttagtatcgtttaccgttttttttatccgctaaataacttctaccattttatataaccgatccattttgtgcccttaaccgaagttattcaaaactcaaaagtgttagtattgttagtgcaccctctatcagaacaaaccagaaggagtgttgtttgctggaacaagctggaagctgtttcagaagactaaaatgaagatcaagtaattgatgatgatcgtggatataccgccaaatgaacgaatgacgtggagaccacaacaagatgagttcggtttggaaagaagatattcacgcgaagatttggagtgatccaagatcttgaagactaacctagaaaaccaaagacctcgatgatataaatagaggtgctaaggttcttcttagactcggtcgtaatagtggtgaaaagcaagtgcaaagcttttcattgtgagagggtaagatttactctgattaggattctagagagatcaaagagtgtgttcttgtaatcgtctcttgtgtgtgttaaggaaatcttaggtgacaagctaaaatagtttagatcttgtgtaaaaccaattaaggtagttgtaaacttcttaatcagatttttaataaagtaatactcagtggttctgagtttgggaaatatagttcttggtttatccagaatttcaagtatttgttttaaaacaggttgtacaaccgaatgaccactaagacctcattctcacctagatctcggatggaatgttatagtctggccaatcaaaatggtatactttttgtgttaccaatcaaaacttgttgcatatgtttttctttcgatctcattgtttttgtcatcaaactgtacttattgttttagatgtcatctttattattttgcatatctataattattttattttaagaaatgtttggtaatggtatgacatcgacataaaaacaaaataaaaggtgtaaagagggatagtgactatagcattaagggacagaagtggtgttgccacatacgtaggttttgcttacatgtgttacgcagtttcgtccacaacttttgttatctttccaaaatatatatagttgtttgttatggttttttaatttcttattcaatgctactaattacctgccaacgttccaccattttattccaatttattaaaatacaaaacataatatatggctacactacatatgatctacaaaaaaaaaatgaacgagaaaaaaatattctgctttgtaaatatgtaattgtggtgttcatcatctaaaagatctccagattaagtgataacaaatgtgatataatcatataaaacgataacaaatacaaaacaataatattaaagaaacagttgaacaaaaaacaaaaaaaacaaaaacaaattaaagtgaacattttagttcagagtattactaatactattacatgaaattatgtttagaaaataaatatagatggatgattatcaaaaacatgtttagatgagatattagaaacgaaaaaactgaatacaaatatgaatatgaaaaaatatagaaaacaaatgaaaaaaaagaagaagagaaacagaaaatggggatatgggaaaacagctgtcaaattatgtcggaagagttgacttaggttgaaaaactctgacaaaacaggcaagactttagcattagtatatgtctaagactttggttggaccacactttctcaattatttagcgaaactttgctctcccccgaattactaaaagatttccttgtctcccttcatattttttgataaactcataataaaaagtattctactaatcaactatgtgatttatatacacttaatcattactgaggtaatgattcatgtcattatttgcatttgatatttgttaatgtaccatattagtttgagctaatgtagtctattatctattagctggattcaagttaaatttgacatattgatgtgaacaaagaaaacaaaaacttgaccaaactaagaattttttttagataataattaaaaaatggaatctcagatcgactctgtgtatttatattcagtatctgtctatcacaaacttctcactttttttctctctctctctctcaaccaagaacatgaagcaaagcttgtgcctggcagttctcttcctcattttatcaacaagttcatctgcaattcgaagaggtatgttgttgaatacagtaatgattagtttcttaaaattaatattatcaataaccaaaatcatcttccttcaactctaaatctttatatgtaatcaggaaaagaagatcaagagataaatccattagtttcagctacatcagtggaagaggactcagttaatgtaagttcatctaaatttttccctaagataaataaacaatttgcttattttattttcctaaaatatgctatcagatgcataccaattaacattttcaaagttaatttcttaatgatatttcagagtaatgttctacttttctaaattgaaatttgaacttgaaagaattcaactcacttttaataattacaaaaaaaagatatgagaaactcaactcaatggtgtatttttatttcttcctaattgtagtaataagtatctcataattgaatagggttagggagttgacaaaaaaaaaaaagggttaaggaaactcaaagtagtttagtaaatttatatgcagaatcagagatcaatattttaacctttttgtctttgtaaaaacagaaattgatggggatggaatattgtggagaaggagatgaagaatgtttgaggagaaggatgatgacggaatctcacttagactatatttacacacagcaccataagcattgacattaattgttatcattttgattaatttgcatacatatatgtatgtgtatgttttgcccccaaaaaaaaagtgtatgttttgtgttgatgttacttagatatatttgtattgtatatgagtcctatgtgacaaaacagctccaagaaaccaatatttttgtttttaattagagaaaaaatgttgattgaataaatctttcaaacttgttaagaatgtgcaaatactagtgtatcaaacgtagggttgggcatggaacagatcttcagctatttgttgtctctgttagatttgcttcgatgacgagtagggcaatttaaatgaacaatttagagggtaaagaagaacctcaagaagaataaatataacttttgcgacatgggacactcgttctttatgataaacggttcaatctcagtcacaaactctggagtaaaagaacatgaaaagatccagaaaacccaacttcaaaatgtacaaaggatatgatgtgtgacggatgtgtgagataaatattttgtagtcttggatatgtttctatggtaccatgaaccttgcatgatgtgttgaacgacttctcctgaactcaggcatagatatattattattaccttctttgatatgggctgtaccattagaaggcttgtcgtccacgagtgaagtgtcctcatgagcatagatcgtcctgcgcggtatatataatgaagttaacaagtgtttggttatacatagtgaacgatcttgtggagttttatagtaaccttagtttgtggttgagggagtttttggacgagtttctttgggcattcttagatttcgagggtggttcgttgtctgtctctgaggaatcactcttgagtgttgaatctgatttgtcaccggcacaaaggtcagagaataggctgatacccacgtcgaagttttggaatcttgagtgtatcacattgtggttgttgttccccttttgggtctgataatttcctacctttgcttcagaatctgcatcagaacgcaaactgatcccaacatcgagtttctgaaacctagctggtgatggttgctttgccttggctttactgctctcggctctggtcttcttaacaccaccttgacgtatgtgtagtgcatgccttatgtgttcctcctcgatctcagggaagagctttcgagcgcttaacttctgatgattttgaaatgcctctgaagagttatcagtgtgaagcctgtggttattttctgctgatgggttcaatggaacagttgaaaaggatttgactactggtactctagctggaaaaggtgttcttgaaaccggaaggttttgggtaacgtcgggcttattcctacttttgatggttgatgctctgtctgtggatagtgatctcctacttggactcggatttaacctctcttctgctagattcggcatcctcgggcttgcttctctatttctcagtgcagacggaaaccctgactttctctgcttgccagttgagcaacttctggtctgcaaatggcattcaccaaactgattagataaaagtctcttttaccaacagatcaataaaaaagaaaaatctagtctctgagtgatttacctcgtagcttctggtaccgtcgtttggctgtggacttgcctcagcctttgttccagcaccgttaccagttcttgggagatggaaaggagaaactgctcttgctctctgacattcagttgtgttccgaatgctacctgatcgcaattgttccagctctgcttccttcttctccatggccgatttaaggctggatatctaaatatgtggaagaaagattgttacaacatatttattaagatttgcacaacgaaaatgaaactgatgccatatgtacctcatccttaagatctcgaatttcaccggtttccttgtttgatcgagctgctccaagctcaatggatgcaaccctttgggcaaacttaagggtgctgatagtctcccctaccgcattaacttcaggattaatatgtacaaacattaaagtttttgcttgtccacctgcacatagtttcatagatgagagatgaagctacaacaaagcacggggaaataaaatggcttgcaaaacttagtttttgtgttcgtttacctaaggagtcctgcagaacttgtgtaagcttgctatttctgtagggaacgtgggaactcttttgtgcaagtgcataaatgacatctcctaatgcagacaacgatttgtttatgtgttgagcttctttgagtctctcgcctacagcttcggatttttctactctttcacttccagccaaatccactaaatgaaggcagcctcttaaaatggatcctgaggccaattcttttccttggacgtgaacagttaatacactgcagtagaacacacagcattcaacgactattatatgatcataggaaaattttaaagcttgaattaagcactggtataaacaaagatttacctatgagaacggctgctcctctcattcaaagcagtggcacccacagcacgattcttttggccaatcctcatcaaatcaaggacatctcgagtattagaaactggaatcaagtttgcatcgggtacattaaggccattgagttgagaattattgcgtatgtctaatgtgagaaactggtcaaggattacgggattctcagaggaaacactcgagaagaatatgtaaatatttcaacactataaagtatatgaaaggatatcttctggaggaaccatcactgactagtagatctctaacttgttcattatatatttcgatcatttggactccaatttcataagtcaccacatgtgttcttgcatttgaaagctggaagagatcgcgtagagctcggtagttcacgccccaagttgtctccgtcatcagatctggcccactctgtaaggcaaaacagagacaaaccaatgtcaaaggcagagtaagaaataacaatgtctgacggtttatgggagtcaccatgcaagcaaatagaaatggtcataccatcgtatacgttttccctgaaccggtttgcccatacgcgaagatacaaacattgaatccgtcgaggacggaccttattaccggttgagtgtcaatgtagatttgctctggtaagtaaacaaccaaatatcaatagacaagaaattaagcatcatgaaaatagttaggtggtgcaaaaccaaccaattcaaagctaagtcatatataacaaaagtctcaaaatatctttgaaaatttgaatgcacttggagatggacatcgatggaataacaaaacataccttgtgagacagtctgtccaaatactttgttgaaggaaaatattttccgtgcatctttctcctgcttgaaaggattgttaatgataatattaccattttctccaatataatccacagttgattgcatatctttttgttcttggaagaaaggtctgactctgcagtaaactctaatggtgcctacagtacaacgaaaacagaagttgatacactacaaaatactaaaactcaaatgcaactatgcaaggatgtagtaggtcgtggtacctttgagatcttgaacctcattgtaaagtaagcgattttcctccagaaccttgtggtaagaagaagatgtaacttccatggccttaacgtgatggactgccatagaggatgatagagattgatcatgtaatctctaattaccgagaagagaaaatttgggtataagaagattcattacctatcctctgaagctctttctgccattctgactgcatttgtttaacttggcttcttgtttccacaaaatttgatttaacttcctacatgagttcatcaaagcaagaaatccattccgtaaattcaagattcttacacagctttcatttacgaattgaccaaatgagaaagttcgaaagcaagagaaagtattggaagagaaatgtaaattctgacctccagctctttctgttgaagaccaatagcttctacatgacccggagaaaattcgcgggcgtttagtctactaaactcaagctttccgccacatttacaaaactttgaaaactcctttgacaccaaatcttttctgtgctgaaggtatctgaagactgctgctagaaactctgatcttgacagatccccgttatcacatttcagtattttccttagaaacgaacccagctgcaaatagataccaaaaaataattgtaaaccctggagaaatgtctcaccattcgaaaagaattccatgaagagtatgcagagtaagtagtacctgagctccctgagaaactagtattgcagagaaatccttaactaccctgttcagcaatgtatcaatcacctataaaagtaaccaaaaactgagaaggtgaaacacgatatattattcgagtctttaaatggttgattcaacaggagttaaggttttcacattgcgtaacttacagagcaatcaaacataactcaaacatgtcttacctaccatttcatttaaaggcatatcattgatcccatcactctccttaaggtaaccatgtagaagctgaagcgcgaaatgatcaaaaagaaaagccaaggagattgcagtttcagattcctcagctgagatctcattagaaagatgaagaaaatccaaaagctggtcatactgagaagactcagattcatccaaagaaacagactcatcggtagtactttcactaccaatcccatactgcggcggagaactgccttttcgattgaatgatactatcctcacagtccctccatacctccatactccaactccacccgcttgtttccactcgtaaaaacctttcaaacacaaaatacaatctactactttgttcgacgatcctccctgcaaaaacagaagccaaaaaaaaacaatctttcatatcctaaacaacttacgaaatgcatcattcatcatattatcattctctggggaatttcatcgaacataacatatgcatatgccaaaagataaagtaaacaactacataatgtgatattgaaatagaaccttctcgagatcagaagctccaaatgttaaaagctgcatatcctctacagctttaagaaagttcctcatgttctcaaaatattgaattgccgattgcgccgctccatccgcgtactgaatagctggcgtaatcggattctccaccaccttattcaacaatcaaaatcacaagtaattcagaaattactcgaaattgtagaagattaatcacaacaacaacaaaaaaacaaagttgaatcaatcacaacaacaacaaaaaaaactcttaatctcatcggaaagtagaaattaaaccctagttcattgcattagactagaagaatatagaaggattagaaattggaccttgagaacagaaccgggattgactttgttgaggacgttgcagagaatgaggccgttgcggagggcgagggagaactcgtcttccgacggtttttccgggagtgtctccatcgcgccttggtccatctgtctcagccatgccaccgcttggtatcttctcagagctaacgaaatttgacaattcacataaacccaaaatcaaaaattcaaaatacatgtttctcgagaaacgtattattaataacggaaaacttaacgcggaaataaattgggctcagatattgattcaaagcccaatatctttcctaatgggttttaaaaaaatattgttgttactgttcttatatataatcttatggcaacttatgttgcttaagggaatatttttggctaaaatacactaattgctttagggaatatatacttagataatcttacattttttaagtaaattacttatgattattttattaaataaacaaattttgttttcagtgtatttagagaattttcaaaacaataaggaaaaattcaaaaaaaattcgtaatgcaaatgttaaaacggacaatttggcactaaaaattcgtaccgaactgctttatatcacttatgtaaagaatatttattaagattgactcttttgatctctaaataaaaactattgacaaaaaataataataatagttttgttggtttaaaaaattttactttttagctggttaccgtttgaccatctgaattagtagaattttgcttttaaattttctctatgtaaacactatttttggataattactctttgagtcctcgaattagcaagagttaatgacatttcgctatagtggcaaatgcgcttttttgtcaatcctcacaaaatcaccctctttcctatttaccatcttgtcatcaaggttatttctttaattatgacataaaatctacttaaacaagctttacaaaaatatgttttttcaatttaaaagtaatagttgtgttatagaaaaaagatttgggagattatagaaaatttgaattgtatatccaccataccaaacataaaagtaataatagttttgcggttgtggtgggtaaccctataatgaaagccatattccataaagcaaatttctaaacgactttctctaaattcaaatcaaacccaacgtaattgtttttgaatcacaaagctattattaacatatatatggtccatcttcgacttcttttttctttactttatctgatttatatcttcattttcattatgaaaaacaattttaaaaaacaaacagtgatgatgatgagacaaacctgtttcttcagcttttcgttgagcaagctcataatctccattgcttgtggacgacaccaccaaaccctttaatcctctcattaattcttgtggcattttttcacctttcttcttttattatttttctgttgagttgatttattacttctcttccacaagatagtattttctgaaaacacggtttcatcaatacacaactctcaaattcaacaaaaatgatttttaaacactcattttgcattttacacagaaatcttagcttttagaagcaacccgtttgctgacgttaatagactattgtgtgagaagaccacattgtaattaaaaacaataatcttatatctgtaaatcaaatccattgaagaagtgatagatccctctatatctctataatttggtcaactaatttcacataagaggtctatcaataaatggaggatttttgactagatttagaagtgggactagagagaacttacatgcacgaaccttaattacaagtgttgaacttgaagggacaagacaatccacggatgatgttgttcatcgatcacaccattcgaaccagaacaaagaacttgggatgatgagctcttggatgtcgtaacttctaagatgggatagagagaatagagatttgtgaagaggaaaattaagagttgattcgttgccttttgcactttattgtgtgttttttataacgggtagaagatggagaaagagagacgtgtgtagagaaaatcaagtgttggttcactgtcttttgcttatttattccgttttttttttcttcttaaaacgtcaaagcttatttcaactgtttatcaggatgtattgttattatgaatttattagtatctttcacaagatagtttggcaaaatagttacaaacttcaatcgtttttttgatggatttggaaatccgaatcgaaaagtaaatcttatgttttattctttttttgtcggacacatgaatggtatagttagtgtagactactttttatagttgtgaattgtaattagtacttgtgttaaaacgtaaaacccactcctcttcttgcagctcatatgatggttgaccttttaaatattcaagattgacacgtggcgagcatccatcgaagtcagctaacgaaaacgtactctagtcgtaactcgtaagtcggcccacctgatacctcactaagcagcattatatgccctaaaacaattcctccctctttttcatatacttaattttgtatattttgctttcgtatcgtattttcaattttttatatgtgtgactttggaatcaatttatatatataagtgactttggagtagattatatatgtttgaagtgttaggaaagagaatatttctaaggactaagaaataaaaacactgtcttttggaaacaccgaaattgaacttggtaaagcgattcaataatattatggaaattaaatataatgaacttattttggatataatactgcattgttatagggaaatacatttgtgggttttgttcatatatatttagccgttatcattgccattatgtaacaacgactattgagttatacatatagttttagtttaaactttagattaattttcgggttcagttgaccggttaagttagatacttgtatataaagaacatattgtatagttttgcttctttcatgaaaacagaattcgtaatcgtaataaactcctctctcaatttctccttctctctagattgtattagtgacttttataaattgttcttattttatttttgaaagtggtgggagatgttatttccacaaaaataaaagaagaaatcatatatgaatagtagacgttggatcctatggaattcaaatgattacgggcggcacaatgaaagctttcgagattgcttttttctattctttcttttcccacatttcctaacccaattcagcgaaccagttaatttattaacactaacaaattaccacaaaaacacaacaggattttcagtgttactcataaatattttcatatgctatctttaagaaatgttgtatttatgaaaattctatctaaaatttaaagaaatagttataaataatttaacccaaaaaaagaagttataatatctttttcaaacagtattaattggtgttagtctttaatagtaacagatattatgtggttaaaagttgaaaacagtaaataagaaaaatggaaggtgaaaacaaaaataaaagagaaccctagcttgatgtagaagtgttgttaaaagaaaaaaaaaggcttgaagtagaagattgtgatcagatatgacagaagtaattaggtgtgatgagattgtaatttcaatcaagtcttctttttgtttgttctgtttttcataaaccaatcaattaagtttaagacattgagattaaaataaaaagaagaaagaaagaagtagttatgatcgcaagaatgctttgtttgtttgttggtcgcatggtccattattttctttaccatcatttgcgcatgaatctctcttttatttgttgtgttttaccataaattgcgcaataatatctatgcactaatatgggctggttataagcggcccaaaggtttactcgtgcccaaggctggcctgggatgaatactttcattatatttaattctcatttttgttttattatactcgtatgttttacttgtgagctcaaggctggcctatgatataaagttttgaaagaaaaatgatttcatgttttcattagacggtgaattttcaacttaaaactaattaataatgagtagaaaggttcatatcttatatatacactacttaaaatcctacttaatgtccaatgtgaaacattattattcttaattagattttaatcagcgataatcgtgaaactatttattctttaaagttagtatatataaaagtttgcaaattgtatctatttataaaatatttatattttgtaatttccaattgttattaagtaacaatataccacaagtcctctagacaagttcaatttcatgtcgttattgtttttaaaaaaaaatcctaaatcaatttctaatatatgtttagcttctttcccaaaaaccaatttttaattaaaaaggtatgggttgccaaaaatcaaaggtaaatggggataaagctgcatgttaataagaagtatggttatgtgattgaaataaattttataatatcatgaaacataatattcatagaacaacaagatattaaacaaaaatcaacgaaaaactatgattaaaaaacatgcaataaataagcgaacttgtttatactctctccattttatattaggagtcattttagattgtaaatattgtttcaaactaagtgttgttagatattattagtgcaaatgtttggtacaactttccattttttccattactttaatgtgtacaactaataataaattttctattatttttaaggataaaaattaaaatagaatattgaattattttcttattatgtataaaatcatcttaaaacaatacttatcttcgttttaaattataactctctagcgtcgatggttttcttaaaataaaatatttattttactaaatataattgtaaataacaccaatcattttctgttaatacatatattcgtttagacaccctcacacaaaaactttccattattaatgtattttattcattgcccagaacttcgagagtcgataacgacaccgttaggtaaaaaaatgagacaaaattattaaggtgattagctcttttactagctacttccataacatgtgaagaaattgctttggattttataataatttgatgtgacgtcgaccataacgaagcagtcaaatggatgtcgtagaatttgattattgtatggtggttaaagatggatgcagaaaaaagggataatggtaaatggtatatattgtttggatttgtgtcaatctcttttaataaaattgaggttcttggatatatgattttgttttgatacctataatattattaattcagtctaaacagaaaaataaataaataaatttggattaatattttattctttgatgaacggccaaaatttgcacttaatcgttaacaattcaactcacatgcctcaatgtcacatgcttctttaatgataaaacgttaaaccttccgagacaagtagagtgatctgaattgatcaaagacatttaatttgctaaaaatatgaaaaagactataatttaacttacgatatgccgcatgactattttgtttttttaagaataaaaatttaatttctttagtcgattaaaaatatatatgatttaatgttttgtattttttgaatgtataactcttatatctgtatattatttagtatacaattactatgtttgatttttactgtttaagaatatagaaacaataacgtacagttcattaagttaaaatctagattataactaaataatttaaatttaaattatatttattttattaatattatttgttttgtttagtatttaagataatctaattgtattttgattgttatatctaggaatcatcccatggtataccgtttcgtattagtatcgacccaaacccgtcctaccatctaatcccgttcagcgaaactaaacatatctaatggatttcacccgtggtataccgtctcgtattactgtcgatccaaatccgtcttaccatctaaccctgttttgtgaaattaaacattttgtttttgttaattttgttttaataatactttaatttaaaagatatatacttcaaattaattgaaaaatttctttcaaatggttatttaatttttctaaaatccatacattataatattctaaacccgtctcaccatctaatccagttcggtaaaattggttatttaattatttttttctttttttctaataaaatattttttattataaaatttataatttaaatcaatttaaaagttttcttttgaaatgattatttaattttataattttcatatattatatatattctaaacatttttcgttaaatattctaaatattttataacctttaaataactataatatttatctttaataaaatataatattaataaagccctaaaatttctttttttaaaaaataattagaattgatggagatatattagataaggaaatgctaataattaagaatattaattaattgataataatcaatttcaatgacattccttgtaaataagttccaacttgaggatttatttgctaaaatagctacaaaaatgtatatgtagattattgtgaatcttgtaatttcccaaaagagaatgttaaaacctgcttttggtatatttaatagactaggtgagtacccacgctacgcgtgggcttttgttttaaaatttgttaaaataaattatgttgattgtttttattattagtaaagttagattcatcttacattgttataaagttagatacactttgactaaattatatcgactaaatatttcttgtaagtaaaattatcaactaaaattatattgttattaatggtttatcaactaaaaagccacaagttatactcatcagctatagggaacaataaacatattaattaactatattaatctattttctaaaaggtcttagtttgttttctatcacttagaatcgatcaagccagttttctttctgtaaaattactaaactaataaaggttagctaacaaccaaactaaactaaaatacaaatatattgtgtttgtagaaagaaaatcctacaaaaaccctactaaaaatgatctcgtttagtatatactctttttaacacatttcggttcaaacatgtacaagtgttatatggatatctagtttgtagtttctgctatatctagtttgttcttttaaccttctcacgctctagtctcgtttgtagtttcttcaaagagtatattttgactatgcttgattttcaagttcccctttctccattgttgaccttcttcttccacatcttcattcactggttctgatttttcaacactgcatctcactttcaaaactttatagatccaatgtatatctgcaacaaaacgtaatctgtttctttttattttatttattttttattattatttttatctgtttctttttagcctctctgattgtggaaagaagaggagagccgaataacataaagctagaggtaagatgtggacattactttttttataaattacctccaatgtatctttaaaaggaatgaatagatgaaaatcttaccaacaaggtcaatcaaaacttacaaataaactacaacttcacgtagtagagatgatcaaattaaagacaaaaccagagacatatggattacctaatcgtgtaggagttcttgcgctttatcttcaaagttgtagtagagggagatttagatttcagattttgcttcatctttttctacgtcctcaccaattctttctcgtagtccacttcgagaggcatgttctactttcaaagtgtactgaagaaaatttagtaatcatgttcatcatagttatcagaggccatctgatatatcttcatgcatatgcccactctctcatactctagtttttaggttctcggttcatgttttaggaaaaaaacaaaaaatacgaaaagcataacttttttgaaaagatttgcatctgtaccatagatatattactattccattcaaaaatataaccatgagcagtgacattgtcgtacctagaaaaggttatcggattaaagtggtatacaaaaataacgaagaatgatttcaaaaagaaattaaaacttatgaactactcaccatataactaaagccgatcatctatagataaacttcaaaatgctttttatctaaataatatttttgcagccctctctgttgtgatttagaagagatttggaagtgataaagaagtgtgacaaatctcagatcaacaaaattgtatggagtaaccgtagaccttcctgcaacaatttacttacatgaatcttaaaaagaaatcgaatgtgagatgcaccagatctgtttagaggagattgtaagtgagactgaaaacctttgcaatcggctgacacttgaaattcacatctacattgattctcatctttaaagtatgcttttaaactctagataggaagatgaagagggtagcgaaactgaaaaacattaatgttaaacacacgattctccccacataataatttaactgaatatttaacttgtacacgtgtctttacctctattgctgacgtgtcaagcaaatggagagagttgagctcctttcatatatatgattacccaagaatataaaagttgtctttttattgtttaacctttcaattttataacatttttaaaaaaattcatttcgttttagaccaaacaaagattatttgttatcctgattttttatttttttttatcgttttgttgtttctgaaagttcttactgcgttgtctccttgctaagtaaatcatatccaccgtttaaccttttagattggtttaaatgggatctatggattatacaatacaatgttgttaacctgttagattggtttatagaactgattactatctatccaccctttcaaaatggttgacattttcatatctattacaaatacatttttttgtttttcccatttttaatagtccggctagctgtttgacaagtaaaacgaaatcaaatagttattaatagcaagctcagtgatataaacatattacatataatatattattaagtttaaatatgtatgcattcgtaaaatggcacgaacaaagcatagtatctacatatacatttttgcaggcatgttagcaaataaatcctctacttgacacttatttacaatagcatgctattgacattaaatcttttttccttaattatttgatttgatttttaatttttgatttaatatatcaatcacattatcattcaaatttaatccaaacaacaaatcttaaatcaaatcctttaaaattagctacacataattatttacaacattattaatattatactttattaaaaggtaaattttgtaattatttaaaatttattaaacgtttataatatttaacggaaaaacatttataatatttataaaatacaaaactatatgttacatatagataaatattttaaatgtgaaatctataaaaattaaataactatttgaaagataccttttaaattgatttgaattataaatcttttaataaaaataatatttaaacaaaaaataaaacaataatatttaatttcaacgaacgggattatatggtgtgacgggtttagaatattataatatataaactttataacgattaaataaccatttaaataaaaaaaattgaaattaatttgaattatatatattttaattaaagtattattaaaacaaaaataataaaataatatttaattttactgaacggggttagatggtaggacgggttttagtcgatagtaatatgagagagtatagcacggatgaaatccattaaatatgtttaatttcactgaacgaaattagatgataagacgaatttgaatttatagtaatataggacgttatacaacgggtgaaatcctataactaacaattaaaatacagttatataatttaaaatatataacaaaacaaacaatcgacttacagtttactccatgataaaatcaatggattgtacaatatatagaaattaagattatatatttataaaatataaaacaatatgttacatatagataatttataaaaaaatatatattcaatttaaaataaaataaatagtgccgcggtgtactgcggattaaaatctagtattatacaattttttagtttatttcataacaaatactttcactaaatgtatataatattttatttgagattaaaaaattaacatgggcaaaattttaaaaataattttaatctaatattaaaaaaaaaaacatggacaatccggcagatcctaaaatgcatggctgatggctcccttcgacgccacctaccaccatatatgaaatctcttccacctaactctccactcatcaccatttcgccatttttcttgactcctcttaaataaaattatatattacatttggattacctttaacacactttttgtaaattactacagagtaataaaatagtacatgattactaagaaaaacaaaaaattaaatcttaaattgcttagctaatgaaagtgacttattgatatactttaatagatttttaataaattttatctatcaaaagaaatgcaacgagacaaactcaactaccaccccggctgattcttccaagcctcattttatgtcgttaggctataataatgggaaaacaatatcgtacatgaaattcttaagatcataaacactaccattcatgatcaaagatgacaacatgatgatgttagatttttgtttaaatatttaatatatcaaatattttcgaccatttcattctctcccaccaaaccccatatgggttttttttttctctcctaccatcatcacataatcattcacccacctgaaaatataaatcaagtttaattttgttgactgcgataatctataatataattttatagcaatttcaaagatcaaatgtttgtgggaagagaacgtgggcatttgggtacccgtctgggttcggtttttttttttcgagtatcggatctattcggataggaggttaagaaccattcggatatttttaaatttcggttcggtttcggtttgggttcggatttttgggttcgggttaggttcgggttttttacttatatatacccaaatctatccgaaatacccgattacccgtaaatatattggttactttttatccaaatataaccaaatgtaaccaaaatacttaaattatctaaaaaaaaatataacattggttacttttatctcaaatatatccaaatatatataaattactaaaaatatgtatattcggatttataattttaattttgggtgtttgaggtattacaaatatatatatataactaatatttttaggtttatatttgtattcgggtacccacgggtattagattcggttcgggtttggtttgggttttttcgggtagtgaaatttaagacctattcgggtaattataaaatcgagttcgggttcagttcgattatttttcgggtttttcagttcgggtattcggttccggttattatgcccatgcctaatagaaccaatggatagtggttctaatgtcaaattgcgagtgatgaatatattttccaatctactaatcgtaaatgttatcttgttttggtcactacagatgttttaagtgggtaaaaagttagttttcaaatagattttgatgattagtctggattttggtatacaatcctcctagttgataattttttaaaaaatgtttgttggaagactcatattagcctagactgtgaattcagacgtatctgtaacaagttatattatccagacctgactttctataaagttagcacaacaagtcgttgttagactatatattaataaactggagtattatttattcgatttttaaaataaattgaaaagtctacaatgtttcactggtcccaaatctttttttgttatagaaccatatttatttcttttgttttaagacagtagattattaataatcggcgctgtttatagcttccgatttacatgtgaattattactagattcaacatgtaagtttcttggaaattatattgctaatttcttgcgactcacctagaaaccaaacgttgaacccttgagttgagttcacacgtgaccggtgaccataactttttttttttgtatctactcgtgaaaacttcaaggaaatcttcacaaaatattttaatgatgttggaaattatatcaccaactacaataatggagacttgttttgtgaatattatataaacttcgaacaaaatctttgtattgtatattaaatatgataagttgatttttattcacattcattttcattggtttacttttttttatcatgtaagcgattgtttaatggtatacatatgttgtggttgagcttagtgaacttgagatgaagtcctaacagaaagttttagtaacaacattatgctgataattacataaaagaatttggtcttaagcttttgatattgaagaaaatattaggatcatctctactaaaaatatgatttaatagaaatttgtagtaaaaatactaataacgttgttaagataaacaaagttacaaaactgatcacatttttctaaaaaatatgtgtaaatatatgtctttgtttttggtaatgccaatcatttttgcttttcttggttaaaatcgagtgaatttaccaaagaaaaccaaggaactcaaaaagattctgcgaataaaccacaatgttcataactattaagtaagaatgtaagatatatctggtagctagtaacagacaaataaaattttgttttctcctaatcaccacgtgaataatgagctctacatttacggtttaatttcaatgtatactacaattttcacaaaaaaagaaagaacagaataatttaataaatttattggtgagtttgtttttggcgatggggtcatgcttcttctgtggatgtcatggaccatggtgtcatatccatggggtaacttcccagcacccttaggaacgacgtgtactcttgaacctccgcaagcgcgttctgtgcacgcggctcagccatcgatgcctcaaaatccacgtaaaacatgtactcgaagttcttcgacgtcccaaagctcccgtcaccaacaaccctaagcgggcggttatggtgaggccgggactcgatcttggtcaggctaatgtctctgaaagcgaaagccgagaggactttaaagaggacgctagttcctttgtgctcttgggcagcaaagacgatgctagtcttgaatggccggtccgtgcgtgggattataggctcacgcgccaacattaggaaacgagtgacgttccccgggtcgtcttgaatcccatccgctaatatctggaggttgtaaagctcagcggcgcgtgcgctcgccacagccgccgtgtcatgtaggtcgttagctgagatatactccgcagcagccgctgtgtcatggaaagcctcacgcgctgcatgtggtgtaaggacgtcgagggagtgttccgtctgcgctagggcttgcgggtgagagatcacccgcgaaacacagtcagttcggactcccgggagtgcgaggaggcaatggtggaccggaatctgaacttctccaacgatgtgaagacggtgacggagaagaagatcatagtttcgatggatcgaaccaccgagtgagttctccaccggaagcacagctcgatcagcgatccaaagctccaccgcctgaaaagcaacgtcaaactggtcacaaggaatggcgtcgcaattgggataagcttttccggcagctgcttccgagtaagctccgggaacgccttggtaagctacacgtagactagaaccatgcaacggtgccggagatagatcagtaatagtcaacggctgagcaggagctaactttccgttagttgactcaacggcgacgagaccaagattcacagagccgttcgtgtgaccattaacggcggcgattttgtccgctaaaccaccggtattttcaacagaagcaactttactagataaaatggcacatgagctttgccaatcagatcgactcacggagacaccgttagggaagctaaacgactccgacctataaccgcacgtaacagccacgcgctttggaatcgcgtgggagaaacatttgttcctagacgtcggatctgttgatcggaacttgagatcacacgacgttgcggcttgcatggtttggtaatgatggtaagacaaacaaaatttgagaataaaagctgtattatagatttatagtgttggaaagcttgagttctttcgttgagagagaagctcaagctgagagataaaggagaagagagatggtcttatatacacactaacacacaagaataaattttgttttgtttttgacaaaattagtcttgacgtatgtaattcggtaaaatccttcacctaccaccttccatgtaatttctatacttttttttctttctgaaaactataataatagttgtctttattgaaatatatgatattgttggtttacgtgaaagcgatattcttcatttcttcttagttcttaccatggttttgtattgttggtgttacgtccatagatttttctacaaatatcaagatcattggtgtttcttttgagcagtggatggtaaaatttctcttaaaaagtattgaatattctattattatatatacatatgtatatatatatatatagttttttaattgtttgtttttcaattaaaacttagttacctacttcaagaaaaattagatagtttatccgcactatgtgtgggataaatatattatagtaaattttttattatttgaaatctgaaatttgcctgtgtattatttaatgtaatattttttttttgaaccatctagtttttgcattaaaattattattgcccgtatattgattgttattaaatatgtataaatatattagttattatttttataattttcttattaaattaaattaaaattatatttttagaatcttctgaatatttataatttacttaagtgtaattgatattatttttggaaaaaactttatttataaatgtattggtaatatctgattagaaaaatgaaagtagtactatattaatatttttgttaacatatgatttatgtttctatataaaaacgaaagtagttctatattaagttctgaaatattacttgcttaattattagattattttaattggaatttctttttttaattatttactacttttaattggatttactttttattgtttctgttattgagatatttatatgtactactaatgataaattttataaatgatctagtaaatgagggacaatgaagtaaattgattgagaattgctctgacacatcagctggcatttctgtaaatacgactgtaactaaattttgttttttaagtgtgattctctattaataatttaatatatagaggataaatgaattcagaaattaataaaaattttgattacgaaaatatatagtaggcccaaagttcactttctcatatgtggaattttatatgtccacgaataacacggttcagctcaccttcttttactttgacacaatcgccaagctgtgagagcatgcgcagaccataatggacacatatatagtaaatggttttgtatttattatgatttatgaagttgttggtcattttcatttttgacgatgtctattatttgttcgctttggtgaaaatatttggtaattaattaacaaagtgaatactgttttacgaaactcggaaggtgatctatgatctgtcatttcgggagcatatatttatatacatgatttgtatttgactgataacatatttcaggatcttggatattgaatccgtttctactacaaaaaaccgcaaaattgtgtgttttatgccaaaatccctaaatttgtgatttttttacttaaactgttttccagtaaaagtcgcaaactatgtcatcccgtaaaaagtaacaaaatcttgtttccgtaaaaaaaaagtgtaacattgaattttccgacagaatcattatcttatattcttttctgaataattgctgaaaatgaccttttcacattatccttttttaattatactctttcctatttgtcattttcatttctaccctctttaaattttttaatgaccattttacccctatttggaaattgttttaggtaaacaaaatgaaatattaatatttttcgcttaaaatattccaaaataaatttctcgccaaaaaattttgaaaaaaaaatttctcgccaattttttttttggcgggaaatagcttcacaagggattttaaaagtgttttaaaagatttatacgggattttaaaagggattttaaagggctttaaaagatttacaaagcttcacaagggatttttaaattgtttgaaaagtgttttaaaatatttacaagtaattttaaaagggttttaaaagatttacaaggaattttaaaagggttttaaaagatttacaagggattttaaaagggttttaaaatatttacaagggattttaaagggcttaaaaatgatttaaaagatttacaagggattttaaaagggttttaaagatttacaagagattttaaaagggtttaaaagggttttaaaagatgtacaagggttttttaaactcttgtaaagttttttaaaacctttaaaaatctcttgtaaatcttgtaaaacccttttaaaatcacttgtaaatctatttctcgccaaaaaaaatttacaaggatttttatagctgtgaaaaattttggcgggaaaaaaaaatttggtaggaaaattttagtttccaattacatgttcctattagatgaggataatttggtaattctgttcaaggaaatgagtatttttaaaaatggacaacacgaaagagtatgttacaaaagagtagtaaaaaaaaggtagttttgcaaatctccttcttcttttttggttaaaaaccataaaattgcattttcccgacacaacaataaccatatagtttctttttttgtcatcgacaacaaccctattgctttaccaaaacacacaaatctgttttctcgcaaaaaaaaaaaattatggaattttttaatagtttattcgattataaagtcatcaaaaaaaccaaaatagttaagattttaataaaaatacatatagcttaaaccatatataaattataatcaacaaaaaaagtgtactcaagaaaaagatacatgtaatctaaataaaaattaaatagttaaattcggtggtgcaaaatattagcattgattgaaataattgatgcattttgcatcggttaaaagaattatttgaattaatgttaatatgtatcagctgcaaaatatgaggttaattttacatcagttaatataaatgatgttagtatttacattaatttattaaaataatcttaatatttaatttcgttaatattaaatcatttttataataaccaatattatttaatttcattaattaatatggaagcaaaccattaaattcattttggaataatagttgctaataaactttcttatatggaggggggacataacagatattctctgttagcctgtaagactaaaaatagcttggttgctctccacctcttcatcgaaattgtttcgatttcccttatttgtgtcaatggttgtattagaatgtttatgtatcttgtaaattttttatgatatattatatttggttggctggaaaaaaaaataaaaaaactttgttacaccataaaaaaaccaaagtcgcttatataacattcttaaatgtctctttttttaagtgaaagtgatgtgggcgtagataaattagcatcatttgtttttacgacaaatgcttagtcattaataaattatcgattgttattgattaaaattttctattattttctatatgacgtaaattcatatatttatattaatattctgaaagtaatgcaacatcatcgatgattattgtatctgattttaaactataacgtacgtgcgggaatttcatattttatttttaaaaaaatctaaactaatcaaaatatttttaaccatttgattatgggtgttaaataggatatgaattcagttttagtttcggttatatcatgttatattagttattttggaacggaaagctaacccgtcttgtatttgtcataaattcttcatcccataacccgtctcgtatacatgaaacaaaaacattaacttgttatatccatcgtaaatagaatatgtgtaacaaagtatatatgtgcaaggttatgtgtgcaaacaaatttattttatatagttttcataacccgtactcataccagctagatatgaattttggaaactaataattacttaaaagtattttctgtttttatttaaatttatgaattttgtaattactattacatccttaatgaattaatttaaaaatacttaaaaccaatggtattttttgtaatatcttaccttttataaggttatattatatccaatgcttcctaattaatagtataatttttgtatcgattataaataagtaatttaaatttttaattttcttaatgcaactgcctttttctctatagtgcatttcacatatccctagtatctatttaatttttgtttatacgaacggcatattttattttatttttgtgacacaaccaaaatcaaattattcaaaaaaacatagatagcagattcaaatcatatatatgaaaattggtcaactctctatatataattgacacatcattactttaccatttttcatgtatctattaattaattaatataatctcttcaatttctaatttataagttaataatatatttattatttaattgtagtattactaaatttattttaatattacatgatttttcaataaaaccattttaatagttttctcatactcgaagattttttttttgtaatccaaactcaaagtatgagtatataataattgtggattacttaatgatttgaataagttattctcttaaattgatatttatattctcttaaattgatatttatacaataaatcactgaggatgaaaaatacgtaaggaactccatcatcagattcttaaatttctagaatccaatattaccttctgctaaataaatttaatacaaacgttgtttatgaattatgtgtatgatgcattgttgagaatatttttagaaaaaatatttttaatagtaaaagtaattgcttattgcatgagtgaatgattagataaataaaaattatatataaattaaataatacgaaaaaatcctctgcgtaacgcgggtgatcacctagtaataataaattgattccatttataaaaaggacgatcgaaaactaaaaccttatctttttaatgatttaaggttgactttctcgcgttgaattcacattttgcatttgttaaactaaatagaaattacaaatcagttaagacatattcaaatccaagtttgttagtaaaccgattcaaattgactagcaaactaactttctatagaaatgtactaaacaacttataaatagaacgtgacgcagataaaagctcctgtaagataaacgcaaaaactaatgttttgaaaagaaaaagaaaatgacaaaatcgaatgtgataatggtaatattgttggtgatgattgctgcaataggaggagaagcacgacataaacatagaaagacttggataggttgctttaggtattgttctcgcagctgtagcgagtacgatggaaattgctttgaacattgtaagatcaaatgtggtggtcctactcctccaaaaactaattcaaggtagatttttttcattcttctttatgatagagttggtacctaatatcgttaaaacggactagcctgctccatctaatcttcttcgcaacatggtaaaatatcatgattgcgggtttgcctgccgatagtgtggatttagctgtttaaaatcatccatcatgatggactaactcgaaagacctaatcttttttgaacctttaaaaattagttctaattaacatgttgtcatgacatctatacttaacatgcgggttcatgattggaattaacacccttgttggtcacacttaaattttgaatttcataaataaaagtgaaactttgttttattttatttttcaaatacaccatattttatacatgactaggaatttacatgggaagaattatacgtacaatgaagaaactgaggttcgaggaaagagacattgataaaaggcaactcatgtagagacgacaatcttatcactatttactaaaccactagtgaattcttcagtctatatgttgttcgcggaagttcagttaaaagaccatccaaacatagaggcttgcttttcataaagaatattatttcctatcaaaaacaatgtataaaataatatatgtgttaagagaccatacatatatattggtcaaagtatcaacaaagaaaaggtaatcgtttaagatgtgtttgaatttcaatactttaccttttcaaagatcatttttgtctttatgcattagttgtactcttgtagcaagatatatcttcatggacgatatccgaagagataaatcctttgtcacgttattttcagatgagaaacaaagccaagacaaaagtggaagaagctggtgcttgttatcagataaagctctagttacaactttattctctacaaaatcactcacaaagaaacagagaaaaacatcaataacaaaagccaaaaaaaaaccttcttcagatacttaaatctgaaaacatatctttcgaaccatagaagtcgctcttctcaacttctccatggacgaatcagccaccaaagtaagcttcttctccttaaatatttcttcttacgtactctttgcttctttattaatggtttctttcttcacaagaaagaaaaaaaaaaattatgacgtaatagaatttctgattaattcttttgtacctttagggtttaaaatcgctggagttgaagaatagtgatgacccgttttccattgagggatataacacttagcttcatgcctatactctcaaactcgcattgagaaaacacttctcttcatgcggaaagatcaaacatatttatgttcctagagactttgaaaagggtaccatcaagagtgtttccttcatgaggattgagggaaaaggtgctgaagagaaagcattggaacttagtggaactgcaatcgttaaagctgcaccatgacagaaagaaaccatggatcattcattgacgtgctgctcttgctgagagaagaaccaaagaacaaagcctaaacgttactggatatgacactttgcttcctgtgattgatatcgagatggcggtgtgtaaatatctctcttcatatggagaggtcacgcgagtaatggttctccctagctatgctcgcgtttctattataggagaaggatgtgtaaagaaggcactaaaactaagtggatgtaacaaatttgctcatgccttcttgattcttggtaacatattaaaaacctctcattagtttcgttgtttacactctatattaggttttaaaaagaagattgagaaggagaagaatatggagatggagcagtagaaggctctctcttaggagaagaagaacctctttttttttctttttctttttttttggtaaaagagaagaacctctttaatgtttataacagtaaattacaatacaactgatcctttctctacacaaacacatactaccgatttgcaaacaatggactggatttaccaaaatcttagcgttatctcctaatcttttcctagcatgaacactccctgagaaacaaagctacctcctttagggatcaaaacaaactctttcgcttctggacttgtacactcctatacagcttccacctcttgaattccacctaaaaatttatctcttttactatcatagctggtcactctagagtctaattcagtttggtttctgtctgtgtatgaaaaaaccgtctaacaaaagtacataaatcataatccagccagggaacacacactgaaatatcaaataaccatagattatatccaaatttgtattcaagaagtaagcctaaacacaaatcccaaagctgaattacatatgtttgttttaaagactagtcacaaggatcaaacagttttacaaatcaaaaacagataagaaacatagccaacaacaacaaaagtggaagaagctgttgtaagttaccagataaagctcgagacttggttccaaagttgataactttattctctacaaaatcacccacaaaagaatcaataaacagagagataataatcttcattaatgcaagtcagaattagctcaagacttaactgcattctttaggatgacaaagacatcttagagcaacaccacagttacccttaggtctctcacaagcgatgcataagtccggtatgtgaccttcgacttccatagacaccctagctcttaatttcacttcctctgttccggagacatggaagagaccagttgagcttttgaagtagagttttccagatctgcaggttatgagttcagatgggtttgagattagagtgttaccacagtagtagatttcttcttgtgggttttgtgtggaaggtgggagaattagagagaagaagagaagaagaaggacgatttttctgggaatttcttgcatttcttctgtttctttgttgcttttttttttgtgctttgttcctttgcacagtaatttacgatgagagtgatttttagtaatccaaacagaagttacattgctaaagtaaagtcatatacaatcatacatcacttctttttagactatttacaaattcttactctactccaaatcacattctaaaagtgtatcatttgtattttgtaactccaaaatacgacccttggtccatcgcctcgaaatttatcaaatgtttaggaatgaacaagcagttgcagaaaaaacaaatattgaaaaagcagcaagctttttgtttcacaactattcattcatatattgatgcgaaggcccatttgataagaatgaaactatgaatctctctttcttatccttaaaatcccaattacaatgaaacaaaccctaaatcgataagcttggagttacagttctcaaatcttatctcccaagaacagagcacataaagctctaatcctctttacacatcaatgatcacgcaggatccttttctctctactctctcttactatttataagcttcttcacacgtgactccaatctctcacttcagttctcacacgtgccaacttctcatgaacatatcaatactcccccatttagacaagtttgtcctcaagcttgaaaatgaatgaagaatctctgtgacaggttctagtaccaccatgacggcttcccttatgtatcaacctctggttactctactaattcatcccaagctgacattgtctctaagatattgagtgtaccgcattgacgaactgcaagcttctgacaattcttgaagaatgtggtgaccccttctctgaagttcatggacatgcgacaacttcaagcctctgttttgcactaatgttgccaactcacaattcggatttgatcctgcatcaaacttatactcaaatatctgcaaataccgagctttccagcggtgccaaacatggtaactttcaatcccacgttgcatctttgtactccaaagtgttgcagcaactagtagataagattgactgaagtctcctagttttggtttctcatagatgtgcaaaactgtggccaattgttgtaggttaatgatatgcagtttcttctttctccaacaatgccacacagaaaaatagatgtctctgtccccaattgttgtgtaaaatccgacaatctccccttcataagcaatcagttccccttgaacgcatggcttatcaaacttgagcaaccaagtcgttaaaaacttgtcttgctaatgatgttggaagtgttcagttcctgtgacagcctcttcatataattcagtcttaaaagaatacagaaactgccaatagatggcttgaaatgccatgacaacttataatgatgattgccataggacagaacatagatgattccattgctggcctgaaccctttttaactccccaaaaatctcactcaccctcttgacaatcaagatatgccactgcaccttgcttccattttgaagccaccaccacaagatcgttatagtacccatttgtcggaagagattgtgttgttgcttatttccttctttcacctgtttgaacttaaatctccaagacttaaagcacttcctctgtttccttctacttagtagtcttgtaggtatgtgagaattcatttggtgttcccaagaagactgcaatacatccgtctcagttagagatatcatgaaagcttctccataagcaacagcttgctcattaatgtcttccactctatggtctttaatccatgtgattgactcacaatatttttttgatttagagacattagcgccaatatcagattgcaacgctaccttatcaacctctccaagtgtgtcacctaattgttctagaacctgtttatgtcccttcgtaggaagaattgccctctcaagtggagcttgaaaaatttggtgtatggtaaacactcttgcagtagattctccaaagctaacaagcagtctgcatttccttttgcgcgcacaaaaccaaaacttctcgattgtcccacaatgaattagattcctttagttctgaagtaacctgtagttttgcactcttgattttcctacaagtcactcttctactccaattgtataaccagctatgatcgtttcgtttctcaattattcttttctcaaacttgtatttcaagcttttgatccaagtgcgtaaccagccctgattgtgtagtttcctaattcttctcttctcagccttgtatttgaacatccaagattttaatcctttcattttcttcttcgtttccagtcgttctttaagtggagacattttatcgaacatcttgtgtgcagaacaacttttcattatactcacttgttgaattctcccaacatcaccgttaaccacatccattttactgctcttctgaatctttgtcttaatcactacagtttctaagttttccaccactgaatttattgccataagttcgttgttcctcaaattttcagaatcagaaacaagtagctgtggacttagcaatgtcgcatcattcttcgatcctttctcaactgagatttcatcaacttgattcaaagatttgtcagtgatctccagagaattatgtaatttctccactggaatcgtttcttgaatcgtggccattgaaggagttgcttcttgtggatcgaccgatgtattcttcatcctccggatcttcgattcgtctctcctttcctttaaaaattgatcttgcttggcaagcaatctgattagttccagatcttttctgtcgccgaatctcagcaccaaacaatccctcaaatgttcccaagatcgaaaaagaatcatcttctgtctcctataaaaccacgcctcagcttctccttcgataagactctgtgcaagattcatcttctcgtcgtccgtaaaattctcccaaacaaagaaatcctccaaccatgaaatccatgatcgcaattcatgagtcacaccattgaaggtgggaaatccctcaagacacattgcgattgacaaaaatccccaacttttgaaaccctaatcttcttgcgttcgattcgatccgagcacactaacgcaccatttgataagaatgaaactatgaatctctctttcttatccttaaaatcccaattacaatgaaacaaaccctaaatcgataagcttggagttacagttcttcaatcttatctcccaagaacagagcacataaagctctaatcctctttacacatcaatgatcacgcaggatccttttctctctactctctcttactatttataagcttcttcacacgtgactccaatctctcactttagttctcacacgtgccaacttctcatgaacgtatcacaatccgcaatggtaagaggtcatgaggggctcttaccaattttctaattttaaattttgaaaattctaaagttaatgatcttcattgaagcttttaaaattatcatgtccaatggtagggatctttaagagataattaggttcttctcaacttcttcaacattttcgtggctatattgcctctcttattaacactcaaagtagtttctatgtctaatatcatcgagttgtgactaccgagtgttagtccattaatttggtgcgtcaaaggctaatgtgaattgttgtttatagaagtaagggctatattaatctatatgcccagataaatcaaaaattaagaatatatcattgttttttgtattattagttctctctctatatttatgtaagttggacgaaaatgccctcatcacatatatcaaattatttagcaatgtaataaaatagttatcgatattcttatcatcaaatacttgaggaataacatattataaattgatgattatctattaagttaacgtgataataatatatatacatgtaagtaaagaaatatatcatgttaaaacatatgatatcgcgataaaaaaaatgttaaagaggtatacaattagtaatgtgttagatttatttttaatatgctaagttatacaatatatcatataaacttttcaatatttctttttctttcattcattatgacataaaagtacggtaaaaataattgtaacgtactaatgtttcatttagcaaaatatctcacagttttgttttgttagcataaaatttttgttaagtaaatatgtcgatttcaaagcttgagta

SEQ ID NO: 490 - DNA, 98461 bp, Arabidopsis thaliana
tattttcaattttagtcttgtccgttctggtccgttatgtctaacttttaatatttcctttcccgttaggtggttgtcttctgtttctcgaagaattattgtgataggtgtgccgacgccttgactgggaccgacctcaccagtagctctgagaaaagtgaaatccgtgtcttttgcgataaagcgttttcaagattgaaagggtctgatcggaatttacctcaggttggttatcttaagactttcctgtcttctcacatattaaatatagagaagtaccttgatttcctactcattaactgttggggtaacacattttataggttctcagactccaaagcttacttcatagaggaattggtgttcatcatgctgggctgcttccaattgtaaaggaagttgttgaaatgcttttttgccgtggtgttattaaggtaggcttagaaactcagggacttgtgttattatatgagcctaccccattaatacaatgctggagttaatagttatctatgcttatggttgctgcttttaggaaatctaattgccatgttttcgtaatctgaaatgcttcaggtgatctatttttgttaatcttcctgcaggtgctattttcaacggagacatttgccatgggggttaatgctccagctagaacggtgaggctattttgatttttattattaatgttaatctggtgctacaatgttaagtgggttattctttacacataagtatcttcatatcatgtgggggaacaagtgtgggtattctgaaaagcatattattcatataaataacttctcgacgatattcgctacaggtcgtttttgatgctttgaggaagtttgatggcaaggaatttagacaattgcttcctggagagtacactcaaatggcaggacgtgctggcagaagaggacttgacaaaacgggcacagttgttgtcatgtgtcgcgatgaagttccagatgagagtgatctgaggcgtgtaattgttggaagcgcaacaagactagaatctcagtttcgactaacctacataatgatcctccatcttttacgtgttgaagaattaaaggtatctcaatgtccggaccgttgatctgttatgcgttttgctaccaagcctttctcttggctttttctgactcgccagttttcaaatggttgttattgttaggtggaggacatgctgaaaagaagttttgctgaatttcatgcccagaagaaactacccgagaaacaacagcttctcatgataaaacgttctctaccaactaaacatattgagtaaggacaaagcctcatcttacggatacttgaaagactgaaaatctactgaatttttatcctctgatggatcgccaagctttttgtagtctcagtagaattataaagaactcctattctattgtctcgtttgtgtcacctctgtattcaacttctctgtagaattgatctattgatttattcatccagatgtattaaaggtgaaccggcaattgaagattactatgacatgtacatggaagcaaatgaatataacaacaagatgtcggaagcggtcatgcagtctccttatgcccagagttttcttgtacaaggaagagtagtggtcatgaaatctggaatggtgagaccctgtctctaccactcttttatctggttcataaattggttgctcatgcgtgtaatttttacagggcatagacaatttactcggaatcgttctgaagggaccttccaacactaacagacaatatgttgttttggtgataaaatctgaaataccgccaccggagaaaaatatggtcagcattggcaagaaaagttcagatccttctcaaggttattttattgcgcctaaatcaaaacgtggttttgaagaagaattttatacaaagccgagctctcgtaaaggtcccgttgtaataaagatagagctcccgtaccatggggttgctgctggtgtaggttacgaggttaaagggtttgataacaaagaatttttgtgcatatgcgatagcaagataaagattgatcaggtgcgcctactcgaggatgggaacaaggcagctttttctcagacggttcaacagcttctggatctgaaatcagacggaaacaaatttcctcctgctctagacccagtaaaaggttaattaactaaattatagctctgtattagtttttccggctttaagttcatttccctctgatattcatttcatggttctatttcagatttgaagctgaaagatgctgagcttgtggagacatactataaatggaccaacctattgcaaaagatgtccatgaataagtgccacggttgtgtcaaattggaagagcacatgaagttagctagggagattaagaagcataagacggatctcaaagatcttgaatttcaaatgtctgatgaagccctattacaaatgcctgcctttcagggccgggtacgttcaaatgagaaagtccacatgcatctttgtttactctttatgaatgataatttagagtaacatgtagagctctaatctcttttttgcagatcgatgttctgaagaacattgggtgtatagatgatgacctcgtcgtccaaatcaaaggtcgtgtcgcttgcgagatgaattctggggaagaattgatttgcacagtgtgtctgttcgagaatcaattcgaagaattagaaccagaagaagcagtggctataatgtctgcctttgtcttccaacagaaaaacacttcagcgcctacactaactcctaagctggctaaggctaaacaaaggtttgtttcgatcactctctgtcccttctcataattactaacagtaattgatctgacctgatcaatctaataattgatcctcttttgcatagactctatgatacagcaatcagacttggtgaacttcaagctcagtacaatttacaaatagaccctgaagaatatgctcaggagaatctcaaatttggtctggtcgaagtcgtctatgagtgggcaaaggtttgttgtaaccagagagcaatctttcttaacacttcacgattcagacatctttttgatcatatatgcttgatttttgcaggggactccatttgcagagatatgtgaactgacagatgtcccggaaggtctgatagttcgaaccattgtgagattggatgagacatgccgtgaattcaagaacgcagctgccattatggggaactcggcgttacacaagaaaatggatgcagcttcaaatgccataaaacgtgacatcgtctttgcggctagtctgtatgtgaccggagtgtaagatttgatcacaattcatacatttgaccagagacgcttctcacttaacttgaaattcaaatcactaaacatgtccacaaatatagtagttaaatttttcgttacgactattacagaaatggatttcagtttagacattaacagacactagtaaataaaaactcctcttcctcagttctattcacgcgttaaaagattaactatgaaacacgacctctgttgaagatagccatcaacttaggcactagcttgtcatgcttcatcacataccttttcaagaactcctgatcagtacataccaagacagatgaaatcggagggttttcacttccgatcaatcctttcgacatgagagctttgatcacgttagaccttggcactatcctcttctccaagctgtatccaagtaccgtagggatcatgaccacagcctctagcggccaattcatcatcttcaccaaaacctcaaacttcttcctcagcgtctcgccagaatatgcagtgcaacaaggatatcgcttaaccatcatcttgaaatcatctctactgaatcctaagcctaagaacatttcaatagagtctaatatcttctgctcagaagatcgtatgcattgtggacgactcttcaacaccgaaataatctcttcctctaccaaaccacacttcttcagtgtttcaaacatcagaattatcttcttctcagagaattttaaaaagtaaggccacttcttgaaaatcgcccatatctcggcttcactaaagcctaacctcttatacacattcactttctcttctatcgttttctcgctcatttcgtaaactacatgcaaagcttccacaaacttggatttagccggatcaaaacccatatcaacaactttctttaaactttcttcaaacttctctttaccacaaacaggttgatatctagatataagcaatgaaaacaacaacttctgaggtactcccaattctctcaaaaccgatatatttcgaattctgttacctttctttccctctggacaagaaatacacaaacttttaccatcttgcataatgtccttaacgaaatcatagtataaactaacagattcttcacctttcttatccaagattgttggaacattcgaaacaatctctatgacctcagagcttgaagctcctctagactttaaaaactgaagctttggacgaagagatttctcagcatctgttacaagcaatcgtgggtaagcccttatgatcctagatatctgagaatctttaaacccattacttctaagaagattcagaacagaatctggatttaccttgtcttcgaaggtgactttctttgagattgtttctgcaagttttttagtcaaacccaatgattcaacgagataagagactgtgaaagtacttccctttggactcgaatctttagctattgtagaagagaacgatttggtggtaaaaggaaatgcattttgcacaatgctcactgtaactcttaaattacgccatttctgtaattccacagactttcttccatggagaattagagaaaacatgaggaagatgaagattggcgaggaaggagtaagaatacgaaattagggtttaagaggaagaatcataaattcatataaaccctaagatcaataaagattccattttcttctgctattgaggaagaacttgaattgggctaatgggccgattaaatgaattggctaagcccatttaaatatgctcagaatttgcgagttttagaatggatgaatattttttagaatttagaatcataaattagcagagaaaacaagacaatacaaatcccaaagaatcaaaaaatgccaaattgtatcagtgaagaatttaaatgtccatatttattcttctataataaaattttgggtctaatgggccgagaactacatgaaatagttaaaaagcccaacttagaattttagaagttttttttagggtggagggaaatattggcgccactcactcacacacactccatttaatggcggaactacgacgcttcttcgtcatcacaacaacaacaattcgacctcaattgaaattagggtttctctgcaactccacaaacagactcttaacaaaacttcgattcccaatttcaacaatggcttgcgtaaacgaaccatcacctaaactccaaaagctcgaccgaaacggaatccatggcgattcatcaccatcaccattcttcaaagtgaagaaactctccgagaaagctgttataccaacacgcggctcaccactctccgctggatacgatctctcaagtgcggtggattcaaaagttccagcgagaggtaaagcgcttatcccaacggatctaagtatcgctgttcccgaaggaacttacgcgagaattgcgccgagatctggtttggcttggaaacattcgattgatgttggtgctggtgtgattgatgctgattatagaggacctgttggtgtgattttgtttaatcattctgatgctgattttgaggttaagttcggtgatcgaatcgcgcagttgattatcgagaagattgtgactcctgatgttgttgaggttgatgatttggatgagactgttcgtggtgatggtggttttggttctactggtgtctaagtgataatcatcttcttcgtttatgaatgtgttttggtttttaatttcgtcgaacagtttgtgggcattattattgtactatctctttgcttcatctttagactattcaaacaaactctcactgttttttttctttgttgggctacaaaatgaatcaattacaagaaaagaaagaagagatgacttacacaaaaaccaagccaaaacagaaagaagaggtctctttaatggagagagcaaataaatcaaagcaaatagagacagttgattataactaaaacataaaccactggctctttttctctatgcacaaaaatgagtgactctagacgtctcaagcgaatttaggcttaggtaaggctgagttgttgctgctgctgccgccaccgctgctgtggtggtggaatgatccgaatatatgaatccagaatttaggacatttctttagttctggacagatctggctaggtaaaagattaagttttccttcgcttgttagagacttcttgaaatgttccaacactttgacaatctgccagaattccggtctcttgtctgtttgcgatgaccaacatcgctcgatcagctctttcatggccgctggacaatccgtcggtataactggcctaattttctggccaatatcgaaacaatgaaatgtttaataacaactgaacaataatgatctaactcagtcagatctatgcaagatcacaatcatgaaataaggaggagatgcagaatgatttaccttgtatataactagatcacaatcatgaaataaggaggagatgcagaatgatttaccttgtatataactgcgtaggcaatttgttcagcaaatttcatctcctcatatggaagtgctccagctaccatttcccataaaagaagtccaaaactataaacatcgcacttccgtccatgtggtatccgttttaaaacttcaggtgccatccacctataagttcctatgttatcccccaaaacatcacagtactcctcctcgcacgctatgccaaagtcagcaatcttcaagtgaaagtcattgtcgatcaacacgttttctggcttcagatcctgatgaactatctctcttgagtgaatatattccattcctttagcaatatccagaccaaaatcgattagctgttccaaaggaagggatttctgctcgagcttgtgcagatatgatcttaaagaccctcgaggtacatactctgtgatgatacagtttccagtattcactccaacaaactgtttcaggacacatcaatcagaggaaaaaagtcaaacaaaccataatcataattttcaaacagagttgaaagatgtaatgttaattttcaaaggcatcattcatatttgatacaacctaaccaacataatataacatgatataaactcaccttaacgacatttggatggcttagtcgagataaaagagtggcttccacgataaactctttttctaaacgagctcccaagaatatgtcgtcactatcctcaggcgctgtgataatcttcagagcaacagctttgccttcatattcaccatgataaatctggctatatttcccgtgagcaaacctatccccataagacaacttagacacatcaatgaggcattcttcaagcactcctgcagaacttactttagaacctctatagtcaacagactttgaagacttcttatctatcttgctctttcccctctctttaactttctgcgtactaagatccctaataggacccgagtgagacagggaccgtagattaactgattttttctcagaagaatctttgcgggacgacgacttggccttcattcccttctctggttccactcttctaggatgtggagtagaaaacctcttaatatcagactttgcttcgataaaagcatcagaaagagccatatgaggcaacggagaaacagatctcttcttattagtaactggattcctctgcacttcagtaccaacaacactaccacaactcaaaccagtcagctgctgcgtactctgacaaattcctacaagtgatttcaaatcagatggtgaactcaaagtcattcttttcaatccagaactcttctcttggtttacagtaaaaggcatagattctaaactcggcgtaatcatacgataacaaacagtatgagagaaatttgctctcctaatccaagaagtaacctctccatccatgtttaaacccctccccaaaacaatcacacaatttcttaatcaagcaaagccataaagacgaataagataagtatcaatctccaacaatctcgtcttcacagatccattgaagaaacaccatctatcttcctcaaccattaaatccaaaatttcaaaatttacctacgaacaacacatcaccaaaaaatctccggaaagttttctgaattacaccaccaactctacacatgcgctcttcctaacaaaaatcaatcgaatcaaagaacaacaagtatattaagaaacgattttgtttcattgatgaatcagaaaaaaacgaaatagaaatcgagaacgtacctgaaacacgaatttttcaaaaaacaaaagtacgaagcgtgaaggtcggggaaacaggaatcggaataatccgtcgaaataggttttgagaagagagaaatcaaacggagaaattgatagcttcaatggtaagcaacaacaagacgagagagatttcgagttcgtattttttttttttttttggtctttgacggctttagagagaattttagtattaaaaaagttgccagaaatacgaagggaagacaaattctccagaattttggtcaaagaagaataacacggtagcgtataaagattccaaaacggtagcgttttaaactatcctaaacaatcagatatctaaatttaatagtcaacttaaacacaaaagcgtttgtagtccaatggtaaggttctactcctagcagtcgcatttgcctctctaatttatagagatcaacgagaaaagaatattgcacaaactaattaaaatatccaaattatcacaatttttatctcttaatcgatttattatttgaaattgtattgctttttttgtgtgttataaaagtcaaaattgtttcattattttgctaaaagttcaagaataatcagtaataacctaaaacaaaaaaaacatgtcgagtgttggaactgggagcatttacacacacgattctctcgcagtttggaaaacaaacgcaaccattcttttgcatgaggctcgaccacgtgcctcttcccatctctcacgtgtttcccttttagaaaaattctaaaaagactacagagaaaatccaaattgaggttttgatactcccaatgaaacgtcgtcgttgtatcagttccaacgactcgctttgcctctcctttcttcttctctctacaaaataggattcttcgtttcttcctcgaatacgacgaccacgatactgaccaggtgagtaatcataaaccctatccctctccctgctccaaacaatggcacatgaacccagtagcccaagttcgaatcttgtttctaatccggccaatctttcagcttctgggttagattatagctctgatttgagtaataagcgtgtctctgatggaattatttctgggtttgggagtgagcaggtaagtattgatgctacgaatagaaacaatccaaatttaggcaataaaagaagtgatatggatgatgaagaattggaaaaggtgaagtttttatgtagctacaatggaaagataatccctagaccaagtgatggcatgttacgttacgttggtggtcaaacaaggatcgttagtgttaaaaagaatgtgagatttgatgaatttgagcaaaagatgattcaggtttatggtcaccctgttgttgttaagtatcagcttcctgatgaggatcttgatgctttggtttctgtttcatctagtgaagatattgataatatgatggaggagtttgagaagttggtagagagatcttctgatgggtcagggaagttgagagtttttttgtttgatgcttcttcgtctgaggtggatgattctttcggaatattggagtatggtgatggagttgatattgggcagagatatgtagaggctgtgaatggtgttgttgtgagtaaggaaagtgtagctagtggtagttctaatccgaattctgattttagtggcgtggatgttgttgatagcttgggcgttggtcagagtgattttgtcgcaactacttggacctcgagtaatttttcacctcagacttatcatagtaatgtatcaagacttgttcctcctgatccacgctcttctgcttatgttgtgccaatgactgtccacgccgatccgcctcattcttttcagcttgagactgtttcagagaaaccaatagttggtaagatgcagcagcaacaacaggggtatactacaccatctgaacatcatccaccggcctatgttgaatctcgccaagaagctttaagacaaccagatattgttcattcacctatccagcttttgccaagtagtacttctttgttctcccaacaaccttttcaagatagtcctttaagtgtctcatcccaccagttccttcctgctgctcacatgtcaatggctcccttgaattctcagattagttccacaccagttttgattaacccggtaatgcaaacccaagaaaatctgttggggaactatcatgctgctcaaaagttagtaccgcttcctacagagccaagaaacactgcatatcaaggtacgatttctcctggtataccatttgatggttatggcgggtctcaagttccaccatctaaccatgttgttctccccgatggaagtttctatcaacaagtaactatggctgaaagttttcaaagggtaaatgattgtcatatgtgccagacatcttttcctcatatgcattctgatccgattatgcgggagggaaatgatggttctacaatgtatgtgccatatgtgagctcagctttctatgcttctcgtccagatgatatcatgagaatccaacaaacggataagtttacgggtcaacaaagcttcctcaatcattcaaatcatcaagaaagagatactttacataacgccaatcttgccactgctcaggtcgagactactgaaccttttgtcaatgagatagtaagagatgttccgataaaagttcaagtaactaggcagcagcaacatcccgtagacccttcagtagcatatgcacaatgccgagaactaagtggattggtggataatgttaacatacatgctcctgaaatatatagcaattgtcagaatttcatctcaccagttgacaaaattgggaaagaagatattatgggtaccagttctcaacaaatggcaaggaagaatatgttcttacatgacacctctggtcagtctccagtaagtccaaacatagatcacactgattcagctaagaggctaacaagagtagttcttccaggccatgaatctcagcctaaggaatcatgtgtgccaacacagtctcccttattaggcaatcctggtttgtatctacaatcattggttggaggtcagcagttcgattcagcggaagcgcagtccagcaatcccgcttatgacgttgttgaatctacatttgatgctgcaaacttaccatcatccttatcatcaaatcctgatgctgctaatttaccatcatccttgtcatctagtgttggtggtgcagaccacaaagaatcatcaaaatcactttttagtaaccaggacccatggaatttgcaaactaactcaaacgaggatgtcaaacctgatctacttaattcttcgaaaggtgagattgacttacatgttatacatgactccattactactttttttggtagttatccttgagaatgatctgttgattggtctttggttctctctgaaaggctccgaggaggagcacatcaaacaagaacttcagaatgttgctgaaggagtcgccgcttctgtgttacagtcaagcacaccttcatatcatgaacctccaattaaggtggatgagtatgcttttaattcgaaaggagaagtttcacgtaatgatgaaatgaaacagcagtctacacacttcaaggtccttagcatactgttcactattcttgtcattatttctttagatttcatattgcctcagaattattgttattgtttctcaggatatcaggaaccaacttctagaaagactgaatttcggatattctggttctgattcgctggatcagttgcaggtttgacatcttgttcttgattcacttatgatcattatcttatgagtataatcatatgttttgcgtattagattataaaggacagcgaccttgaggaattgcgagaactaggatctggcacatttggcacagtttatcatgggaaatggcgaggcactgatgttgcaatcaaaaggatcaatgatcgatgttttgctggcaaaccatctgagcaagaacgaatggtttgtctctgtacagctgatgatgcataacctaaaaaaatatttagacatatgttgaatagttcataatgacatctatcttatatgcaaaaattatcagatcgatgacttttggaatgaggcacagaacctagctggcttgcaccatcctaacgtcgttgctttttatggggttgtgctggattcacctggaggttctgtggcaacagttacagagtatatggtcaatggttctttacgaaatgcgttgcagaagaatgttaggtatcgtattttttatacattcctcagtgctacgttgacacttcagattcatgcttagaataacgccatttgattgttatggtttattttacaggaattttgataggtgcaagcgtcaactgatcgctatggacattgcttttgggatggagtatttgcatggaaagaagatagtacactttgatcttaaaagtgacaacctgctcgtcaatctcagggatcctcatcgcccaatttgcaaggtcaacttactcttgagttttatttttctgtctgtttttcctaagtaatagtttttgtttatttttatctgtctgcatccaactctaacatgggaatgtgggattcatgatcataagggacaacggtagagaatcaagtcatggtattgaggattgtaagcattttgagataaatgtctagattttttctgtagagaaatatggacatacataaggtttagcattagttttgaatagagtggtgctctttggtgttagaggaggaattgtacattatgaaattgtaatgcaaatttgtttacctctcatttaaagttcttaatagacatttttgattatttcaggttggggatttgggtctctcaaaggtgaaatgtcagacattaatatcaggtggtgttcggggaacacttccatggatggcacccgagcttctaaatggaaccagtagccttgtttctgagaaggtttctaaactaagctgctcttatcagcttggttatttgtctctattatgttattatcccctctatctgataccttaatctggatgctacaggtcgatgtgttttcattcggaattgtcctctgggaacttttcaccggtgaagaaccttacgccgacttgcactatggagcgatcataggtgaaacccttgatccataattcttgtgtgcgggcttgtatgctttattttctattctaaccaaaaattgaaatcaggtggtatagttagtaatacgctacggccgcagattcccgacttttgtgacatggactggaaattgctgatggagagatgttggtctgcagaaccatcagagaggccaagcttcactgagatcgtgaacgaactacggaccatggctacaaagcttccttccaaagaacaaggctcaacacagggaccacaatcttaagactaactgtttcatatgaattgaaccatgttcaaatctataaccatacaagatgttacatgcaaataggtaatgctagtctataaatcatctactacttcttgcatttttttcgctgcgtcaacatataaacacacatcgcctcagaatctccgcaattttatttgttttatagcaaccacaacttccatgacgagtacacgatgaagtcttttataacaatcataacaagaggtcagacataataatataatcaccctagccaaattgtggaatctttccaatcattgtcaaggtcaagagactctgtttttgtttcctcccaagccaaaccaagatccttaaaacattgtttggctgtcttctccaacgaagcatcttctgagaaacaagtaaggcaaatcttgtcaacagagttcttcaactcctccaaagataatgagtcttcctttaagatcttctgcccggtttgccggatgtaagagttcaaagcgtcgttcaaatgcccaagtaagtcagcctcagagaacatatagtacatcctactaaggtcatcatggcttctctcatccataaacttgacaaaaccctacaaacacacaagtgcttagaaagctattgttcacaagaaatcaaagatatcaaagggaaaagagagctaccttttcaagaatgacagaaacatgatccttgagaagtattctctcaacagcttccatcaacgattcctcaaactctttaaagaagtagagtccgtgtctgcaatttttcttctcctcacgccacatactcgacacgtttcaaatacagtggaatgtctgactgctccttgaactgcattgcttctgctgagtaaaactcaacagcgcagtcgataaagggtttcttgaagaagggcgacttgtagagagactgtccataaaacaaacccctaagattgtttagctgagtcatgtgaacagacatgactggtctggtggtattctttagctgagtcatgtcaacagacatgaatgatctggtggtaacaatgaaaaggcgaaagagttatcagtaaatccaaatctatcaacacctattgtatacaaaacattatatttatccagcctaatgtaacagaaatttacctttgatctctaatgagttgtagaatgatggaaagaagcttgtcacgaactttctgggctgagaagagatgcttgggagaaagctcactacccaagtcccacactgagtgtggaccgacggtctgaccttcaccaccggcaatgctacagagaaactgtaacttgcggcgaaagtctagccaacacttctccaagagtgagaggaaaagagagggatccgtatcgcattgcgattctaaagactgtatggctgcagagatgtatatctcacactcctccaagatcagcttgtaaagggcttctcctgaagacttttcacaccatgatttattaacagcctaagaccaatcaagaaaaacgttgagaaagatgcaagaaaaacattgagaaagaaagaagaataagtaagtgtagatacattgaaaagcccactgcatgcaaaatcttgtggctcgtcgaggaagatggctcttatggctggctttagcattgtccaagcatcttccacataaattctagagtccggtttagctaaatgacgtcaaaaaaaaaaaaaaaaattaggacagatagctacgaatacaaaataaaaagtttggaagagatgatacgtacgtgtgtgagggatgatgggcttgaaaatcctcaaaccaggagtagtcttcatggagatacaaacgaaaccctaagagacaggaatttcacccaatcgtgcaacacggccgtttccaagttaaaaagtcgcaaaagtatagaacaaataagggaaatcagatatcaattctcatctcacgttacccgaaacatttttctttatcaaaaaaaaaattctcatctcacgccatctaaactaaacaaaaaatcttggcagacatttttgcttcattaaatggtaatttatttggctttccattttatttttggaaacttttccaaaacaaatcctcatatattttttttatttagatgttcaatatactttatattaatcccacaaattacaaaattctggatttttttaatagttttttaattctatcaagatttaactcctacaattattcattcagacaataatcatgagatatctttgagaatgactaatttgaggaataggagttgaaaataagcgtagatatcttgagattctcaaatagattaaccttttgaacagaagtgaaactagacgaaaataaaaagcgattcatgtagtagcggcgagcgaaatgggagattgtttttgttggaataaaagtacttgatgcaaatattgttggactaaaaatactttacttttaaattattggtaggctttgaacaatagagactaaatataaagagaatgcactattttgggcttaaacgataaactaatgacaagtcccacctgagtccgataatttcagttcaggtagtaacaatgtaatgtgctttagtgcgtgacaattcgcacgacgagaaactaaaaataaagaaaaagtagaaaatatcctactatattatttgggaagtacattttaaatgtaaccttaatttttgtaagtaattatataggtatgccattagaaataaaattttaaagagtaaattaatttatctctttaaggattaaaaagtcaaatactaatttaattaatgaaattaattaaaaaacgaaatacattattaatttccaaaaataatagccaattaaaatcaacatataagatttgatatctaaattttaattaatttaatttaattaaaaaaacgaaatacattattaatttccaaaaaagtaaccaattaaaatcaacaaattatatttggtatctaaattatcatattaattttttattaattattatagttcacttctcatgtttataggattctatttttacggaaaaataatatcatcattataaaaaaataattagagtttttttgcatatgccataatttgaatttttaaaaacgaatataaactgttcaatacatgaaataatattataacgggtgaaaaatagatttaagaaaactttctactgagtaacgggacataaatttaaaatatttatatttaatttcatacatattatattgaaaatttataattttatatactacaatagttaataacatattagatgtgattcaatttttaatacaagctggaaaattatagaattgacgggtttagatcgatattaatataagatggtgtactacatgtaaaactcttaaattaacaatcaaactacaagtgtataatcttaaacactaaacaatatagataatatcaacaaaacatatacaactcacagtttactatacatttaaaatcaaataaaataatatcatatatttttaaatcatctttacaataaaagtttttagtttaactaaaatataagcctacctgcggtatactgcagattaatctctagattatagagcttattggatctaaagacgggtcatcaaagatttcctaaactgaagcaaaatatactgaatattcaaatatctatctgttatcaaattataaacaaataagtcaatttaatattttatatatgaaatcaattaaatcttaatcacataaaaattagcacaaaaaaaagtattcaacaattaaaaatttatcaaatctctgtgttatataagttttgatactatatttgaataaattgtaatatacttttttaatttgtattctttaactaatttaagctaactaatatatttgctaatcttatatctatcaaaaccgactatcgtttcttatctctatagtatttttgcaagacttttttggtggatttggataaaaatgcattcgggtcatatggtacattcccctattaagtaaatatggtgcactcctatgttattagttaaaatgtttagattataattcagagtcatatcattaataaaattaatattaataaaataaatgactttttggcaagacggatttggagggacagggttttgaatcaacattaataaaaaagtaaaatataattaatccaccgtttcaatatgggttaaatctttaatttattattttttaagaccactaatattaaacatatcaaatcatcctaatttagaaaaaattatataaaaccaaaaatgttatgtggtatgtataatgttactatatataaaattaaactataaaatataaatgtattagagaatgatacaatttgcaaaacttttatatataaaaaataattcttaaattttaaaaattactactttaaaaaaaaatcactggacgggtaaaaaaattacataacgtgttttattttggaattgggttatatggtggatgtatttgaatcaatatttataaaattttaaaatattattaatatgcttttttaataggggtcaaaacttcagtttcttaacaattgtctcaggaattcgtggtatagcgttacttaataacaattataaactgtaaaatataaatattttgtaaaaataaaatttgcaagttttaatatatattatttttaaaaataaatcgtcccgcggtataccgcgggttaaaatctagtttaagttaatatgttcagacttcaaaaatttatttaaataaatatgttatatataatgtacttttgtttgtcgtactttttatatgtatatatatagatttaaacaatatgtataacatttataatcacagtaaaaacatagaataaagtaaaaatggtatttacgtagtttactaaactaacacaccaaaagaagttggggaactcaagaaattaaaaaacgatatagctttgttatgaacatttttaagttgtttatgaataaataattcaattttaaaatccatctgttatgctgtaatatttttctaatttataaagttgaatataggtaaaaagagaatcaaagatggaatttgagaaattctgtaaagatggtgattagtataaaaatcataatcagcttggttatttgtctctattatgttattatcccctctatctgatacctttatctggaattctggatgctacagggaacttttcaccggtgaagaaccttacgccgacttgcactatggagcgatcatataggtgaaacccttgatccataattcttgtgtgcaggcgtgtatcctttgttttcgattctaaccaaaaagtgaaatcaggtggtatagttagtaatacgctaccgccacaaattcccgacttctgtgacatggactggaaattgctgatggagagatgctggtctgcagaaccatcagagaggccaagcttcactgagatcgtggacgaactacggaccatagctacaaggcttccttccaaagaacaaggctcaacatatgtaccacaatcttaagaccaactgtttcatatgaattgaaccatgttcaaatctataaccatacaagatgttacatacaaataggttatgctagtgtataaaacatctactacgtcttgcatatttttgctacgtcaacatacaaacacacatcgccttagaatttctgcaattttttttttaatatagcaactagaacttccatgtagagtacataattaagtcgtttctaacaatcataagaaaaggtcagacataatataaacgccctagccgaatcgaatcttttcaatatgctcaaggtcaagagactctgtttctattcctccctaggcaaatcaagatccttaaaacattgtttggccgttttctccaacaaagcgtcttctaggaaacaagagaggcaaatcttgtcaatagatttcttcagagatgcttggggaaaagctccttacctaatagattgcttgggaaaatcgtagcaaatctttgtcagagattcttggggaaaagctcctcacccaagtcccacaatgattttaccaactgtctgaccttggccaccaatgtcacagagaaactgcaacttgcgccaacaattctccatgaatggcaggaaaacagagggatcatcatgacattgcgattctataaagatcgtatggctgcagagatatatatctcacactcctccaagatcagtttgtaaagagcttctcctgatgactttcatgaacaccatgctttctgaacagcctggatgatgcaagaagagtcaagaaaattaaacattcaggaagaaagaagaataagcaattgtagatacaagaacatacgctgataagctcattgcagttaaaattttgtggctcatcgaggaagatggttcttatagctttttccaagcatcatccaaataaattttagggtctcgtttaactaaatgatgtcaaaaaacatgaaaaacaaaataggatagtcatagctatgacgaacacagcatacccaccaaaatttgaaagagtcaatatatatgtttataggagtagtcttcacggagataatcacaggaagagaaaggtctccgatcttcatcgtttttctgtttacttgaggataaatcgccgtcaatctttgagctactcatgggtgtggatcagcgagtgccgatccgaacccaagaaaaacgccaagatctctagcatcttgatacttcccctttttcttcgagaaggacgaatcatcttcagtcattaggtgtttcactaaagaagcttaataaccagtggctgagctacaaaaaattgttatagggatcatattttattttaataattaataaaatatttaaatataatatttaatttcaaaaaaaaaaatccttaaaaaattaaaattcattgtctttaaaaataaagaaaataagagataatcattattgttctttattcataatatacagtatatttatcattccattttaacatattttgtcatagttcaataatattttctaaaaatataatgcaaaagaaatgattgaaacaatataatatggtttccataggtgcaaagaatagatttgagcactagacatgaggtcaatttatgagaaagcaaccaatttaccacaataatcaaatggaacataagattataaacaaaaattcaaagatttatgggggtcatctcaccctctcccttgccaatattgtgcatctgccactgttgataactcaacatacactcgtggaatccgctcgtcggggcatccttttcctcttatatttttcctcatgtaccgctccagcttatgtaagaatttgtagataactggtggaattgacattatcatgccaactgctccactcacggtagaaaatatgacagtcttgaaaatgttccagctttcatatgcataatagattgtcctaagtagcattgtcctacagtttctgaaaaaaaagactcacattttgtagtattattgtggttgtgttctttatcctctttataggctcgatgttgacgtggacatcatgcaactcttccttaagtcaatctctcttctcatccaccatcttttgttccaaccatgtcgggattcacatggagctcgtcattatcaccatttaatattcactcaaagtaatgaatgttatgcatagaaacagtgacaagaagtcactatacaatgatttgatatagtagacaagcgcaatggatctctgaatggtctctgaattgtctttgatatagcaagaggcgatattagacgcaaatggtctctgaattcgccttgcgcataaggcgtttgcctcgtaaaacatataaattcatcacatcatctatataatataaatatatattttttcgtatacgccatgatttaaaaattttgaaatgaatattaaattctttaacctataaaaacaatatagtatgaaaaaaaaacaaaaattacatataatatgaagttaagtggttgtctaaaaatactcataaaaagaacaaatttttagaaaaaagaacagtatgcgtgaaatttgaatatttaaactatttaatatgcatcaaaagttaaatacctacattcacgatcatttattacttttgaaaaaatacataagtatataaaataagataaatatttttgattaacatgcatatattcgctggatctttatcttcatcatgatcttctgtgattaagcgattaatgggttgtggattcatgatagccgattgtcaaactaagtggaatcagaggcatcgatccataagatacagaggaaacatattttcagtatactttgtacttaaattgaacaagttaggttaacaaatctttggaaaccaaattttttttacaaaatgatttatttaaattgagccctagtgataattaaaagaaatatattgcattaaaggtattttatcttactatatattcataattgtttttttttgttaccttttattgctcctactttcacagtattacaaaataatagttttctaacgtatataaaaaagtcccaagtccttttacaaatttatgatttattttaaaactaagtcaagaattgtattaccccgagcttgagaaatccttaaagtatatagtgtgaatgtttcggctcattatgagagcttcttttactaatttaatttactgtttttctttaattatagattgatatttatttacttatatatatatatatatatatatatatatatatatgtttttagaagcaccatgattcaaagattccatcgtcgaccagtacttcttggttctcctgaaaataacataattaatattgaagagaggttccaaaaatggcatgtatatagtcatgagaaaatagtacaatggtttcttcttctgttcatttcaatgttaaagaaacaaatgataagttgtagattgtgagttgatctgtgaaggttattcttaatgactgaaaatagacaatttcttgctgcgcaagtcactttaatggttctctcaaggcgtaacacatgccttctgtagttatgttggttgttcttcttattgacgatcagctaaaccggattaaatgtatccgaacaaaactaaaccaactctaccggttagatgaagatcacatgttgaattcgaatccttttgtgcggtttcctagaatcaatgttcaagaaatcgttcgacgatagtttatatacatcatttgttatcataactttgtggttcatgagcgcctaggcaggcggcctaaactgttttttggaaccttggttagcatagtagaactatagaatatttagagaacggtttaataagtttatataaccattttagcctctaaaagaaatcaactagtcctctcaaatcatttactttccaaagaaaagaaaaggcgtgaaccttgccgttctcttggtacgtactatactagtacttgtttattggttgaccgttaataaattattgctaagctcaagatatcttaatttattaattctattgtcaacgacggtgtctatctttttaattgtatttcgtaatttctatatagaaagcttggaactaatataagtttttgcaatatcacttctattaaaaagagagcacatacatgtataatgtaattcgataatgcatggaccagtcattcatattaggtctgggcacgaagcggatatccggaaaaattgtgatatttgttattcgatttgttttaaacgaatacttgattttgtgatttgctttgcttcgaaaatttccggatatccggaatttcgaatatccagaattttttgtgatatttgcagatatccgctttgatacatttaaatattaaaaaaaactgtatactatataaccatatcagatattcaaagtttttattaaacatgctttcaaaataagttttaaataccaaacacaaccgttgttggtatcatcggtcaacaaaatgttatcaaactaattccaaaaactaaaacccgatagtttttgatgccattgatcaaaacataacattaaaaaaatgaacaaacaaatattttaacataaaaacataaaatgacaacaatacataaactatttatgatatctatatatagatataactatattttctaatatatataaaaagatacggatcgaagcggatattcgattttttaaaaaacaatattcgttatttgattcggtttttacgaatactacattttcctatttactttggtccaaaatcttacggatattcggatttttcgaatcaaatcaaatcaaataccgaatcgaagcggatcgaacgaatattttgcccaaccctaattcatataattggttcacctagtccgtgaacatcttttgttttgggcggctcttattcttcgtgctactttctgttttttgaatttgtttgtatgacatcagaagtaaaagcaaactaagagtcgaataattcaaccctgaaagaaaagaaaataaggttcattagatttcaaacacaaagaaatagtgtttgataatctaaaccgatcgaaatccaatccgaccgtgaatcaaataggtgactgaattaaagttaaatgatcagtttattttgtcttagatatattgagtagacatgcatatatcatacgatgaaaatcaataatttagttcttcttttctccatatatgtatttacaatgaaaatacttgtggatggttacaagaaccttctatggacagcatttgttatcataagtttgtggttcaaaatttgtcaaatacacttatctataataatgcaagaaaaagatagccatattcttcaaaattcaaatgaaattgtggaattaattttgtgatttcataaaaaaaatccaaaagtcacaaaatattcaagaaattgtggaattaatttagtgaatttttgtaacctaagaaaatcaattgaaaatatttagcttccactattaatcgagttaaaccaaaacgaaatatcaaaatttaaaaccaaaccacacacaaaagaaaagttctttataacacaacgagtaattttgttgataaaaaaaaaaacaaagagtaatttcaattgttcaacaaacgcagcctgaagacggcggaagaagctcggcggttttctggtcatcggagggtttcttgaaagtagtgctcccaaagagaaagaaaccaacgccatagccggcgatagcgacgatgaaaacacctgcgttaaaggacataacagcgagcatcaccaaatacgaaaggccagtcttgagtgtgtacacagcggtttgagcgagcccggcggctcgattggttgagccactgacacgtaggatcggtgaatgagcgagccactcggcaattacggcgaggaggaatataacaatgagacagagagcgtacatgccggagcttgtcccgggccatccggagaagagaacctccgtgttcttaccccaaaagaaggtcatgtgcatcatcatcatgtgtggtgttgtatgattcgacatcgatgatgatgatggtgatggtggtggcatgtcatgcatgtgatcatgatccatgatactaatgttaatagggtttatgattgattttcttgtagacaaaatttttaagagagaatcggttcgtatttattgtgatttcttaaatgtatgtgttgtactgtagtacaagtacatcatcttttgacttgttaaatttttttgtgtagtacaaacattcgttatattagaatttagaaaatccccttaaatagatgttcaaaagaaagacaactatataatcccctaaatatatatatagtatttaccttatttgcatgatacaacattacaactccatgcctcttcgtctaatcttctttgcgttggtataataaataatttacacagaatatctaattttaatttagaataaatctaataatttgaaaagaatttatacaaatgtaattaaggatttagtaacttaggtttcaaaaccaaaattaaggaggtgttattggtttgttatttatatagatttttagtggtttgaaatgttatgaaaaatcttttgttattcaattaagattttataagattctattaaagtttagtgttattaaattttgatttgtaaaaagtaatctaaagtcttaataaatctgaagttattggattcataatttaataaagtcatcaatttttttgtgatattcaactaaaaacaaaagaatctatgattgttaatgatttaaattattgtattattggtttataattttatacacttttattcacaaaacaaaatcatgaaaatatcataaaaagtgagcgattgtgaatcataactttgtatataaacaaagaccaatgataaaccatcgtgaagaatgaccatagattatcacaagcctcaaaacctcacgacacagtttgtattgacctttttccttactcttttgggaattccccataaactaagcatatatgtatagatagtaataagaaaaaaaattgataatcactagaattttaatcataaaaaaaaaatatacaaaaccaaaacactcaaacacaaagaagacaatagtatatgaacacacaaattaagaagatgaattaggaaaatttgaaaacttacgtattaacaaaatcgtagtggaatattttgggagagtacactttttgacaatcaatacttacgttttttataaagaaagcctaaaataataatatcattttggtgaaaatagtatttatagaagatgagaaaatattatccaatattttagagatatgttctaataataattgttgcaaaagctttaacaccacttaaagtctcaattacatggctttagataaaaatgaagttacagagagtaaaaaaaaatctgacttttaagactgtataagagcaaaaacaaataacagtctgattgtatgaaaaaatgctgtaaggactgtcaaatgcttttaaagtcttgacagtgcgatgtcaatcaccctctaagagataaaaataattaatgacaaagtttgtaattatatttagacagattttacaagattatatgaagattttacaaaattatagaaaagctaatcatagagattatataaaattctctaattagtgttgttgggtaaaagacaaaaaaaaatatgacctctacgacgacgtatcgatacaaaagcccaaaaaagaaaaaaggttcgataccttgcggttcacgtttcctatcattacctgtccgtcgttttcttcctcggagacgtcacgcaatacttagcttctacgctactcacattttcccacagtctccggaaaactgacaactaaaagctaaactttctctaaatatgaattactaaatttctatctctctcaatcaaaattgttgtctaggagctataacgattcagatttgatggcaatctccaatggcgccgtggaatttctccggcgacgactcctcccaactacactaatccacgtcacggctatagacggcatcgtgaacgttaattcactcttctcgcttgctcttttcctcggcctaaccacaagtggaaacatcactttcccggtttcctcatcagcctccgagaaccaccatctccgccgatgtatctctgcaaaaggtcccgcattagcggagaggctagtatcaagccatgtttactccttcagtttattcctcttctccagtctcatcgctatgtctctcaagcaagcaattaggacaacaacaacaacaacaaacgggaactgtttagaggaggaggcgcgtgtgttgaacgcgggagaggggcgtgtgaacttggcagctttaagggttgggattgttgcttcgtgtgttgcgtcggttttgggatgtgggttcttgacaatggcgttagtggatcttgttcagattaaacttggacctttggaatgtaagagaagctttcatgcacttgcagctattgttcctcttgttgtacttgttccttctgcacttattatctatgtgttccttgtgctctacgcatttatctattaacccttttttgggtttctacaatctcttgtctgatggatttgaggtttcagattcgattagttctgtagccagagatctaatctttggtttaacattagacagtcaagtatacatcattgaaacagtttttttaagaacaaacaaaatgttcaaacaatcaaatattgttctgtttcaacttgatattcttctacagagacgcacttagagaagcttctagtaatatagtgaacctgcgaaaatatcaagattaggcatatgttataagcaaaacaaacaaagacgtgaatattgtaacaaacatcatttggttagggtatgtatagtaccttgccaccagtttcctctagaggcgtcagacgaattggcatcgttgttatctctgttctgatccttgttaatctgaatgattcaacgttttgtaaagtcaaaagattttgtctcttctatgaaaaaatcaacaatcaaagtaacatgaaggggtggatgataaaatgatagttatgttaactcactgtagggtaagtatggttgtgtgtggggtgagagtaaacatcttgaccaccgtagtaaagagatgagcttagattgcaggttccagcttctttacgttgttctgtgaagaaaccacgaaaaccaaggagataatgtatccattagaccacccggatttggatagtaatcttgactaaagaacggtgaatcttagatgaagaatttttgagccgttcttggcatgagatagaaggttttttgagatgaatcaaaacgtttttctagtaaaacctggcttaatataaagtgaaaggaaccatattgattcaagaagggagacaagttttctgaggcttaattaagacttttccactgacctagggacccatgtttggagcttaggatgtttcttgctgttccctgaaaacacgaaaaaaatgagaaaggaagaatgaatttcaagaatccatcataaaaagtaacagaagaaactatagagaaataatcgaaccttggaaggagggaaaatggagttgaagttggcagaggaggaaggttccttggggccaaagagttgagctgtgaaggaagaagacgatgatgatccaactcttcctttaccctccattactaagagaaatgtgttattaactaatcacttagaaggaaatgaaaagagaagatgatgaaaaatgtagaagatcatgagtgtatatatagacaaatagaaaatgctacaatatgataatgtgagaagtcaaaagaacaaaaaaactgcttttaaatttagtccccaccactattttgatttagttaattcggtttggttttttggattttactatgttagatgcaattttacatacgaaagaaatatattcagagagaaaatataggattccaacctttcttgatcacaaagagccaaacacaattgtacttgagctttttcaatccactgttgtcttaacagttttttcaaaaagaagattttggcggaagatcttaccatcattttcatagatttcaccagtaatgtcacattaataaagaatggtcaaatatcattgatcccaaactaaaaatgttcttcttgtctcgtcaagtggatgataacataatggtataatacattaataaaatgaccagataatattccaaatactcgaatggatttggtcatgtatatttaaagagcactcaaatggggatgtcttcatcttttgggggtcaatgattatcatattgaaacacaaaaacgtgagcggcaggattcgaacctgcgcgggcaaagcccacatgatttctagtcatgcccgataaccactccggcacgcccacaaggacgattataaacttctattaagttgttcatgaagtaagaatgataaaagaagagcccttcgacaacatgagaggccaaagaaatgtggaaaaagtagaaaagttgtcaacttagaatcttctttactcaaaagatgatagattcacaaagttaggtctttgactaatattatgaagcatcagaacgaggaatagaagtcacttcataaagatgatgcattcacaaaatttcggtctctgcctaatatcatgaagcatcataacaaggaatagaagtcgctacatcatctgggttcgtctaactaactaagtcttttgtttcgccacttgctcagatctactgatacttcttcaggatcacacattctggatcttgatcaagatagacttcccctgcacaatgcacacaagtcattgatgaataacagtcgcaaacatctaaattgccaaaagactaagacttcataagtggagagaaacactattcataaagaacagtttgaagaaacacttgaagtctgagatagaagagtaaagttatgtgcatacaaacctcagcatctaccaaatatctcttctggtggatcataagcatgtttctcagggaacaactcttcgaaatccttcttcactttgtttctaagaagcggatgcggcagaagccccttcaacaaaaccctaaacggcaactcttccggcggatctggagatttcaacatgtcttcatacacattcatagcatcagctggacatccgtctcgaagaaatcctctgataacctcagtataagtctgagaatcaggaaagaggttttctttcttcattttctcccacaacgccattgcttcatccattcttttactctttgctaaggatactataaggtccttgtacataaacacatcaggttggtaccattcttgtttctggatcacctcaaacatctataagttgaagaaaccaatcatcaacaacacaacaaaaacgacacaaaaccataagaatatacgtatatgatctataaaggatggtctaaaacttaaacaatataactaccctaatgttagctccgttcaggcatttcgtcgaacacttcatgagcacatgagatcaaactaaagatgagctgaagcgagacataagctgaaagacccagaagaaattgtcacgtaaagaacgcaccttgatggctaacgcagtctcttcttgtcgttcaagctcaccgataacagctaacatgtctaatttcaacaatctgaaaacatgggtttttataaacttgtccagcttctcgtcgtcttctttcaatctcttgagacccagaatcacgaaaagggcttcttttccgatcagtttcttacctctccagagaggacctcttggtctcccgtcatggaaccgagaaacaaagacagtgaagggtttcggcggaattgggtgaagtagcgttttgggttttaaattcgagaatgaaattcgatgaattgacggattccttgtaatgttttggaagaaaatcgaagcgaaagttgggaactttcgcgagcagacgcgaatggctgtcatctctcaaaggcgtgaactttgaatcgtcgcctttcctctgtatcacacaataacataaaacacacaacggtagtgttaaacgtacaaacgacaccgttttatggtgcttcgtttgttaaaacgtcgcgttttttagtttagtgagatatgatgctatttctttaaaatctaaaggagatggagagcaaacgagaacattataatcaaaatgaatcataaattatagagagatatgaactgattttgacacattagttcctagcatatataacgataggatttcacagaatggactccatcagaccatataaaatgtgacgatgcaagtttgtcagcttcgggaccttggcctgaaaccgtaaccgtgaaagacctcttctagtacatagacttaagtgacaagaaatctgaaacaaccagatggtgagttttgatcagagtactttggctttgtaagtcgattgtcataccgacgtttgtgactattctaccaaaagtcaggttgaatggtttggtgtcgttgttgggatacaaaccaacgacccacattagaatattagaaaaaaagtaaggtctaactcctactggagccttttgggaaggtatccaaacaaatttgtgcaaagacaatatcaaactaatgggaagttagaataggcttagaaagcccaataatcatggccgttcatggatgggtagttgaggtttcttgctattgattggctttgttcatcactgccactcctgtttacacccgaaatgagtcttaaactctttgttgtgtaattcaagccgcaaaggaaagtgatatggtcggatttagtaacttcatagacaagttattggactgacgtggccacctccataagcaaactcggtcatatgatcgaacggagaagtagatgtgttcattggccaagctacaagagacctccaaaaaaaacagagtatgatcacacctttcttgcaatacaaaaagttatgttttgataaaatcctctcttgcaatacaagaacgttatgtgaacaaccgaggatgaattatcgcatatggttattttccaatattacgcgatgattcatcctcggtagtgaacttccaaaaaataaccgttttaagatgctcatcatccagatatttaatttttgattattctccaaatttaatcaaaactctctaataatcttctgcttggaataataagcgtgtgaaagactcatctttgtgcatcgacttcagaaacaagacatctggaaaaactttgacgttgagtattgatctgactaatattcgctttgaagatagtgttaggcataagccataccaacgttgtgaccgttctatgaaaatttagtataatgttttagcgcgtataatttagtataaaactcctttgatgatcattctcgtgactcttttgatatttagcgccaacatggttttagttagcaccggaaaattaatgcaaagaacactcgaagaatctaactagatgtttagaacaaatgtaggtgaggaacgatcataaacaataacaaagcatgaacagtaatgaccgtggcatgaaaattgagaagcaaatttggaagacaagatatatatcttctagagaggtaatgacaatgtatagagctgtcaaagcgggttgtccatgcccataagcccaatccattaatgtctattttgatattggacaaatgaaggtcatgtccactaagacccatgtccattaacgctcatgtccaaatgggttgttcagtggacatgacataacagaatcaaattttaacacaatagtatttgcttcatattttaatcaatacaaaagtcaaaagtctaacactttgaaattatcaatctaaaagcaaatttaaacaacaaagtattaaatgatttaagtatcaatcaatccaaaagtcaaaaatctaacactttgaaatgtttttcgatgattagtgtttttctgttttgctacaaatcacttaacctaatattttatgactattggatcgttcatgtccatcacgtccagtccgctaaagcccatgtccgttaatgaccatgaccattaatgcccgcttcataatgggtttgtccatgaccagtccattaagcattggacacgggccgcccgtccattttgacagctcttacaatgtacaagacaaaatggtgtttccaggactttatttgtgtgacgaatgatgaattgtatatttgtttatctttttttattattattgaaaaaacattgtctttactttatatatctatatatttaaggaaatttttcattttacccaaaagaataataggttaatattaaatgccgagatatgttattgacgattgtttgtattactaccaacaatggtataacataaagagacgctataatgttttaaaaggatcaaccgatcataggagcatctgcaacttggccgttggaacctaaataaacaaagaccctgttgcagcaaaagttttcaatccgcttttctccatatcgaaggacaatcgctaacacattaggattttctctttcgatcgtcattttcgccaattgtccatttttcccaaccagttctggccacctatacttctttcctggaaaattatttgttttaaaaatagtaatatagtattattaaaaatgaaagaaattgagaatttgaagatttcacttcaacaaaaaaaaaagaatggaaagcatacctatagcacaacactctggatcttcgcaagagccagaccaacatggaggatagcgagacatctcttcttatttctctttcaactaacacaacttgattgctttttattttacttgagctctgtctaatgattttctggttatatatatatacaattgttatatgcttcatatggaaacaaatttatgtactttgaataagaaaattaatcctttatttgatttcctctttttttttttttttaattttcgtattcaaactacaaccttactgtatttgtttccatataaaaacacttaccaaaaaaccgttaattagccattattgaaaattgtttaacaagaagaaagataaatcaattaatttattatcaatagattatttttttactgcacgttattactgtgtggctttctggttcagttccaaaacactctttcaccagtggctttgttgtttggaccgattttctactttcttggctcgatcatggaatatcaccgtggttaggggtgggaacgaatttttagaaattataatatacctaattaaggagaagacaaaatcgtaaaattttaagagtagaacaaaaatactatgaacgtgattctaatatcctatttctttaagtaaacaagtagtaatatatgtgatcattctccaaattaaatcaaaactctcagaaccatttagaaccaacaaggttttaattagaactggcaaatacttagattttatgtttataactaaaatgagtgtaggaaccagaaacatcaaaactaacgaacaagggtttaaaagtaataattgacgataacatatagaaacattaactggttctgattcatcagttttaagcataaacaacaatggggcttctcacaaagtggacaccatcggaccagatcagctgtgccgagacaagattttcagctttgggaccggcgcctgaaacggttaccgtgaaggacttcttctcgtacaatgactttaaagacaagactgccggaacaaccttgactttgagtttagatccgactacctttgctttgtatgtagcgttaggtctaccgacgttagtgactgttctacggaaagtcactttgaagggttttgttcctgatacttgagcagacatcgaagggtagtttaagtttcgtgttagcgatttagtctgttctttagtgcaactgctgctatcaccagagatgagtcttaacttctttccagtgtagttgaagccgcagagaaaggtgatatggtcggatttattagcttcatatactagtccaggatgaattgctgctatgggatcgacatggcccgctccgtaagcaaattcggccaactcgttagacggagaagtagatgcattcattggccaagctacaagaaacaccaaaaaaaaaaaaagagtattataagtttccttgcaatacaagaaagttatgttgtgagtgagaaaaaaaagagtatgctcgaaacagagtggatttgtttttgcttaccggtagtcatgatggcagattggatcatggaaggagaccagagtgggtgaaacgtttttatgtaggcggctacaccagcaacgtggggacaagacattgaagttccgctaataactgtgtactttacatgtcttgtatctgattcgcttggtgggacataaggagaataagcagcaagaatctctgatcctggcgctgttatatccggctgtaataccaattcacattcaatccaacgcagaattgttagaatgaccaatacgagtaatttaatttttctgcttttctgtatataccttcaaaatatcatgaatgagtgggtttgggccacgagaagagtaggaagccacgacaggagctttctggttaaagattgtctcacttttcagaacagctgctttggggtttctagccaaaacaaaaaaaaacgttttgagctttaagatgtgagtttttgtaagaaatataataaaacagagaaagttgctaagtactttgtggagttcacatatgagaggacaatattatagtcatcttccgatagaacagagactggaaatgagaagacactagccgcgtcttcataggggttcctaacaatggatgcgacggctcccatagcttgagcttctccgggatttcgctgggtatcacataacacaatcttacctttcacacgtttactgtctagacaccctggtgagcaaaacctgataccgaaatcaccctttaaaccctcatgtgaagagcataatagatacaaagaaaatgtttcttgggattgaagttacccggctgaagaagcatcgcatctacttgaagctgactttccgtatactagagggtacttctttccgttaagatcaaacgaatttactgatcttccctgtttcgcaacaagcagtaatattgatagaggacaagatatgtacgataatgtgttgtcttaaagtaacaaagatttgtttcttggtactcaccacaattgtcttgccgtttccgagaacaactttggtgatgaacgcacgattcatattactagcagcaacagtgaagagccacggcgccatactcacgattgttctacgttctggaccattgtttcctgcgccattcacagtgaggattcccttggccatggcatggaaagccccaatcgcaagcgtgtcctcctcaaatgtaccaactgcatccgcaccgagggatacggtaatgatgtccaccttatccgctatggcatcatcaaatgcggctagaattccatcagatgtgcaccttatgacaccagggtcacatactttataaaccgctattcttgcagctggaacgccacctctcacagttccattaccgagcccgtaaaagctcacatgcttcacagcgtttccagccgctatggatgctgtgtgcgagccatgtcccgtgttgtcccttgcggactcaggaaacccctctagtttgggtgtgtagtaccgtgctccaataagcttgctgatatacaacaaacagatcgttcacattcatttcaactacaaaatgacaaatccttacaccagtattataactttgaagggttttatacttgttgcaagtgaagtttgtgccgcctttgcaaacacctttccattttttaggaggaggaccaaagcctttgccgctgaagctgtccgattcagggtagattccactgtcaatgacaccgatgattgtatcgctctctatgagagggtttcgctttgtacgtttgccttccttgaggcccatgaaattccatgacgttgttgtttggagatttagattcttgctaggaaacacagacacaacttcgtccatacctaacaaatagcaaaacaatcacaatacatagagttaattaattatttcatagagcgaagaaatgtactttgagatttgttaagtattttaaaaaatttctccatttaatagttcacttactagctagtatctctctttctgattcggtaagccgggctgcgaatccgttgaaactccttttataattcctaaccaaacgatcctggatcgaactacaaaaaaagagatacatttgttagaggttctatgaattcttgatcgatatatagacatgaaaccatatacaaataatcacattagcactgatctacaaaattgcacctctctccggtgacatcttgaagaatactagtgtgatgggacattggcatgtagtcaacacgagaaggaagtgcacccatgtatactatatacacctacaagtatcatcatcatggttatggttagtcattattcatataattagaaccatgaaatgatcataataatcaataacaaagaatgatttgtgcaattacctgtttgtcttgatcatctttgcctgctgaagcgaaactcacaacaagcaaggcaaagatacatgagaggagacaataggagacagcagttgccattttttattggtttactttatttagttattatcaaattttataagaatgaggatgaaacgattatttatagtcctttaagattatgtacatgatctaaaaacgcatcaaagtcctttaagatttgttcctctagttatattaatggttttgaatataccatttaatttactaccgtttttctttcctgctaatatttgcattatctttttttgttgtattgttgttcatgaatacagcaaacatattaaaatatttacaaaaaaaacattaaatagaaagaacctcttttgacttgatatttattatcgttgacaaagaaaaaacttgataaataaataaccttctttgacttgatattaattctcgtttataaataaattaaaaacggtttattcttcttaataaaccactaaaatcgactaacttcaccagaaatggatttatttatagtttaactttattatgactagagaaatgagtattacttgggcaattgaaaaactatgggaatgtatattctgaaatttggttaattatggcagaggtttatcatttgaccttacatgaacgaaatattctccacgcgattatatttgttttagttgattttacaggcgatgtatctatactttctacagagcaaagtaactaagaactgtatcaaataactcctataacaatttttaatgtcgtttcatttttgatgatattatattagcttctatatacataccgattgaaaaacaaataattttccaagaaataagtgtaggtggccagaactggttgggaaaatgaagaaattgcgaaaatgaccatcaaaagaaaaagtcaaaatgtattagcgattgtacttagattgacgactttttctgcaacaaggtcgttgtcgctttagattccaatggccatgtttggaagattcttagtaccggttgatctagtggaatgtgtaaggtagaaaacgaattctactatgggtccaacgtatgtttcagactccataaggtagaatttgtattcatttttattttcatgaaataattaaaatatatgttcacattgattaataaaactatagatcacctaaaccaacaccaccggtttttatttatatggatgaatagaaatgaatttttttttattttttttgactgcaatagaaatgaaaacatactgacgacaactccttctctctcttaaaacaaattttttttttctctctacaaagctccgccgccgcctagggttaccggttccggtggctttttcagcaccggaaccggatttctttgttttagtgtctctagtttcgatttcttgtgggtttaatgtgatctgaatcctattttcttctaacggtttcttttctaaattctcagatctaaatctgtaaagtctaaatcttttcctcttccggttttgttgcttgtttgtctccttcgtctgcagtttcaattctggccgttccaactatggcagaggcaggtttttttctatccttcaacgcctcagatgcagatctctctccattgaagatctagatctccttcctttcttcttgagactttgtcttttgggtcccgggatgttgattgatgtctcagcgccgtttatggtaaggagagtcttggttttatttcctttggatagatctatagtttcagatctgttttaatttaaaaaatttggatttagactttgcttttcagttttgagtttttttagtaatgaatcttgaaagtttaggtttagtatcattgttgttctttaatttgggttttttccccattagatctgtcttagtccccgggagatgtcttgtgctcgccggcttagttcttggaaggattgttttccttgccaacatatgtatttaccctttgtatttcaactcttgtaaggttctgatctaaagtggtataaaaaacaatagatatgctacaaaactcaaaaccttaattagcgttacatatacctaattttaagagtagaatgtgattctaatcaatatcttttatttaagaaaacaagtacatcgatcattctccaaattaaatcaaaactctcatgaccatttcgaaatttaaaacaacaaggttttctacaagaacagcaaaaataactagatttgatgtttagaactaaagtgatggaggaaaaaataaaaacaacaacaaacatatagcatgaacagatagaaacattaactggttcagactcatcagttcgtagcataaacaacaatggggcttctcacaaagtggacaccatcagaccagatcagctgtgcggagacaagattttcagctttgggaccggcgccggaagctgttaccgtgaaggacttcttctcgtacaatgactttaaagacaagactgccggaacaaccttgactttgagtttagaaccgactacctttgctttgtatgtagcgttaggcctaccgacgttagtgactgttctacggaaaatcactttgaatggttttgccgccgatacttgagcagtcatcgaaggatagtttaagtttcggggtagcgatttagtctgttcttttgtgcaactgctgctatcaccggagatgagtcttaagttctttgcagtgtagttcaagccgcagagaaaggcgatgtggtcggatttattagcttcatagactagtccaggatgaattgcagttatgggatcgacatggccagctccgtaagcaaactcggccaactcgttaaatggagaagtagatgcattcattggccaagctacaaaaaacaccaaaaaacagagtattataagttttcttgcaatacaagaaagttatgttgtgagtaaaaaaaatgatgagaatattcagaaaacagagtggatatgattttgcataccggtagtcatgatggctgattggatcatggagggagaccagcgtgggtgaaacgattttaagtaggcagctacaccagcaacatgcggacaagacattgaagttccggtatcaacggagtactttacacgtcttgtatctgatatgcttggtggggcatcaggagaataagcagctacgatctctgatcctggtgccgttatatccggctgcaatacatattcactttcagtcaaatttacagagtaatttaatttttctccttttctatatataccttcaatatgtcaggaatgattgtgtttgggccacgagaaaagtaggaagccacgacgggagctctctggttaaagattgtctcacttttcagaacagccgctttgggattcctggccaaagcaaacaaaagtttgagctttaggatggagtatttgtaagaaatataataagacagagttatggatattacttggtggagttcatatacgagagaacagtgttatagtcgtcttccaatagaacagagactggaaaagagaagatacttgccacgtctgtacggtggctcctaacaatagatgcaatggctcccatagcttgagcttcatcgggattttgcggggaatcacataaaacaatctttcctttcacacgtttactatctaggcaccctggtgagcaaaacctgaaaacgaaaatcaccgtttaaaccctcatgtgaagagcataatagatgcaaaataatgtttcttgtgatggaagttacccggcggaagcagcaccacaactacttgaagctgatttcccgtatactagagggtacttctttccgttaagatcgaacgaatttaccgatcttccctgtttagcaacaagcagtaatgttaaaagaggacaagatatgtatgataatatgttgtcgtaagagaggaacaaagatttgtcccttggtactttaccacaactgtcttgccgtttccgagaacaactttagtgacaaacgcacggttagtattactagcagcaacagtgaacatccacggcgcaatactcgcgaccgtgctaggttctggaccactgtttcctgcggaattcactatgaggattcccttggccatggcatggaaagccccgatcgcgatagggtcctcctcaaaaggcgaactattatcaccaccaatggatatggtaatgatgtccaccttatccgctatggcatcatcaaatgccgctagaattccgtcagttgtgcacccatcgacgccagggtcacatactttataaaccgctattcttgcagctggaacgccacctcttgcggttccattgccgaggccgtaaaagctcacatgcttcacagcatttccagcagccgtggatgctgtgtgcgatccatgtcccatgtagtccctcgctgactcaggaaacccctctagtttgggggtgtagtaccgtgctccaataagcttgctataaaacaaacaaatcatccacattcattataactaagcaattgaaaaatccttacacaatttaattgtatgatcaaatttaagagttttatacttgttccaagtgaagtttttgccgcctttgcaaacacctttccattttttaggaggaggaccaaagcctttgccactaaaactatcagattccggatagattccactgtcgatgacaccgatgattgtatcactctctatgatagtatttcgctttgtacgtttgctttccttgaggcccatgaaattccatgacgttgttgtttggagcttcagtttcttgttaggaaacacagacacaacttcgtccatacctaagaaattagatattaagaaatagcaacacattgagttaataaagttttttcatagagaagaaaactaatttgagttttgattattatttttgaaaactttcgggtcgtaatccatttatgttcacttacttgctagtatctctctttcggatttggttagccgggctgcgaatccgttgaaactccttttataattcctaaccaaacgatcctcgatcgaactacaaataagaaatacatttgttagactttgatcgatagacatgaaaccatatacaaataatcacattaacactaaacaataaaattgaataaattcagtgcacctctctccggtgacatcttgaagaatactagtgtgatgggacataggcatgtagtcaacacgagcaggaagtgcacccatgtatactatatactcctacaagtatcatcatcatagttatggttagtcattagtaatataattagaaccatgatatgattataataatcaaataacgaagaaggatttgtgcaattacctgtttgtcttgatcatctttgtctgctgaagcgaaactcacaacaagcaaggcaaagatacatgagaggagacaataggagacagcaggttttgtcatttttttgattgatttggttataatcaaattttacaagattgtgagaatgaaaggattattatagggagagatactgtatgtacatagaacgtaatcaaagtcctcatcaaactcctttaagatttgtttctcaaattattcttatatattaatgacagtataatgtactttccatattaataggtttttgaatgcaccgtttaatttgctaccgtttcttgttctactaatccttgcatcatcttttatttttcttttacttgtattgtttgttcatgaatatagagaaaaatattaaatagaaagaattttctttgacttgatatttattctcttgacaaaagaaaagattgactaaccactagaagttaattttttttttattatgactagaaatgagtataatttgggcaattcagaatgatgggaagtaaggaatgtatattctgaattcggtttattaattatggcagcctaatcatgggtaagaggttcatcatttgaccttacatgaacgaacgaaatattctccacgcgaatattttttcttaaaagtacttttgcaggcgatgtatctaattaattaacctttctagagaggtaacaaaaaatgtaccaaagaaattaagaactgtatcaaatattatccttaaaatatgaccacttgtgaaaactctatgtgcatattcacatttatagatttaatttagatattgtgactaaatgtactcttaatagttagggtgaattatccaatagaaagcaaatatagtatacaaatagatgtatgcaattgtatgtatcggctcctctttcgtccacgcgattgccttcttttgtgctgtattcgtttaaaatcaatagcaacgtacaattgcgtcaagactaatcagcaagaattgcgtcaggattattcataacctaaagtaataaatgtttaaataggtcaaatatatactttttgaaaatacgttacgggagtacataacaccatatattctagcgcatgtaatttctgagtcgaaaagttggagagttgcccaagaactagaacatgacattgatgcggaggaagaacctgaagtagttgaagcttgtgagtatgcgcacgttcaaagaggagaagctatgtgccaaattgacgcttcgtggactggtattaaccagaatgttagtttggggttcatgttgactagctcaacgaccaagctgtttggtcaaagtagccagaattgttatcgcaatgccctctacgcagaactcggagctcttctttggacaatggagtgcactttacaacaaagtatccaatctatacattttgaaaccgattgcttaagcttacttaagatccttgatgaaagtaaagattggccggtggaaaagattttgctagatttaaagctagttttggtcggttttctttatctcatattccacgcactatgaatgtccgtgttgtctgcctcgcaaagagtgcaagagtacgaggtgtacttttttcccatataaaccctctcgtttcggagtagttggcccacgaaactaactttttcgaacaaatttaattatttgatgtttttgcgataaaaaaaaacaaaaaaaaaacttggtttattagagggcacaaaatcaaatttataacaaaatgaagttattacgttaggttgaaaaaaagtatgacgtttcagggattaataatttagcgttaatgacttaatggtcctcatcttcatcagattagaatgtaacattctatatgtgtcgcaccaaaagactagtctcgtcctctatagctattagcctattaccatcgcaatctccgacgtattttccactagacttgtagcatgttgccttctaaagccgccacatgatccactaccatcttcatttgcccatcggccatcgccaccagaaccaccacattgtttaattatattatatggatcagaactatattcttacaaatattatgggaagttgggaatgtagtggtcaattcatcacatcctcatttcattattttcttcttctattaaagttgttaattcgacattttcaaattgacgttgcttattatcattaccacactcacaaatacaatcattgctctttaacgcaattataaagctcaaaactacatttccaataataccccttggaacatgctcttactttttgccagcctgctaacgaatcattagttgccacatcagcacgataactgaagtctttgtctttttctcaaacgcgacgtcgtttctattccctgacacagagatacgtatagatacaccgtatattcactttattgctcctctcctctttctcacgaagaagaagacgaagcccatcaaattaaacaagaaaaattccattttcctccattgattgtgagtgagaacaaacatttaaagcttcttactcaaagtttctttctttatagatctcaaaaaattcgatatttttctcgattcatccgccattaaggtacacgaatcgtttttcgtcttctgaattacttgtgggttcgtcttaatttcgttggatctgggtttgattttggagaaaagtaataaagtttctgtcttttttttctttcgaatttgtaggttttattgcgagatcgaagagagaaggagaaaatgacgcatagagtagatcaggaatatgattatttgtttaagattgtgttgattggtgattctggtgttgggaaatcgaatatcttgtcgagattcaccaggaatgagttttgcttggaatctaaatccactattggtgttgaattcgccaccagaactactcaggtgagattcgaatttttctctgtttctctctttaagtactttaggagtgaaattcagaatatttgctgttagaatcagagtaatacgaagagatagtaatttaggtttggtatataatgttaagaggcttaaagatgggattttgggataggttttttcttcttattagcttgtctctgttttgatttatctttagctataatccgtgaaggtttttactttcactgctatacatagatttaccgtcttcagttatgtattttggttttgcttgtagcttcatgaccacattagtgtagtgtatatttcaattatgtaatttggttttgcttgtagcttcatgacctcattagtgtagtgtagaattcaggtattcgatggttaatttcaagtgatggctctagagcttttagtctgttttgtttcgtttaaagttgcttcttcgttagtttctttgatttggatagcaattaagtgataggtcttaaggtttttggttgcgttggtttcttaagattgaagaatacagtgttttgagagagtagacggcggattttttctcagctactgaatcttttgttcaagagaaaaaatcttagttgtgctggctatgagttatgacagatgcttttctcattttaagactataaatggatggtcgtgaaggccaattaaaaaaaataagaagattctcacagcttgtctcaataattcattctatttcctgatcatttgtcatgcttgaccttgtccacctttatactttcgtaaagtcaaccgataaattttttgacaagaggaattctatgatacacttatgtagttgaatgcggaaagatgcatttaaaatgttgattgttaataatgttactaacctggttttaacaactgagaagatatatgttctttacttttgattgttgaattagcattcttattcataaacctgggaatgcttcaatacctaagatctaactggttgttacggtgaatctctcatgcatacacaggttgaaggaaagaccattaaggcccagatctgggacactgcaggtcaggagaggtacagggcgatcacaagcgcgtattacagaggcgcagtgggtgcacttcttgtctacgacattactaagagacagacctttgacaatgttttaaggtggctgcgcgaactgagagaccatgcagattccaacattgtgatcatgatggctgggaacaaatccgatctgaaccacttgagatccgttgctgaggaagatggtcaaagtttggctgagaaggaaggtctctctttcctggagacatctgctcttgaagcaacaaacgtcgagaaagcgtttcagaccatcttaggtgagatctaccatatcataagcaaaaaggcactggctgcacaagaagcagcagcagctaattctgcaatccctgggcaaggaactacgattaacgtcgatgacacatctggaggcgcgaaacgagcatgttgctcttcttaaactaaaggtaaactgtttatttcggttgctccttgttcagagattcaaacttttgttttcactggcttctcttcttttcaagttttggctgatgaaacgtaactatgcaagactatgtagaatactctgtttttattctcttcggtttggggtttgtgttcagtttaaagcttgttagtagtatacttagaatcttctggtgcttgcttgctttcccttcttcttcccttggtgtgtttctattgatttctggtttataaagtattttttctatctccggtttagtccggttcgtcttggctttgtttaatcaaatcattgattcctctcttatcaatgtattgtatccggttccaaaatcctctcttcatgttacacactgacaagcttctaccaaagaaaataaattttagtattacgaaagaaaaaattgttgacaaactaattttgctccatctattatcacaaataaaaatgcaattgaactgcagttactatcaaataatggctatggttttttattttgttttgaaccgaccaaattaaaagatgttttgaattaatggtattattttcaagtaaaatagaggaaagtgacgacgatacatggagacagaaaaggagtgattgagaaaccgataacaaaaacgtcattgtagcccaacttgcaaaaactaaccaattgcatgcatgaaagagtttataataaatcatggaattttacattgtcaacgtgtgaggtttttctttttggacacaacccaaaaggccttttagttctaaattgtttcatattagaaaattctaagttcggaaatgctatacatgaaaattcttggtgatttctaatgagcaaaataacatgaaaattcttggtgatccattatatatatttatgcgccgagaaaccattcagagaaacaataaggaagatagtaaaacctcatctttctaatcgataacttccatatccttcgattaaaagcttttgatcaatgcatagtccaaactttatactcacatatactcacatacccataatttagaatttagatctcatttaaattgataagctatttttgtagttataaaatacataaacccatccaaaatattatcattaagacaaaatattagaataggtatattaaaatagaataatgagagataacatttttaagaaataaacaataaagaatcaatgcatagtaaaaatgaatttgttatcttgtaaatacaatataattttatcgcctgttttgagccttcttgcttctatattattccaccctgagcacataaaatatttatcatggtctatttttattgttacccagtaactcttgttattctctaaaacttccacttgaagaccacttggaggcattacaaaattttctatagtgcgtagtatcttctctatctgcaattttggttaatataacctacccatgtgggaaagatcggtgtttgtaagaactttctctaacattttattttgatccatatcaagccaaatcactattttactaaactcttaacaaatttagaaattttaaaaaatgtttgtagaaaataaaatgtttgaagactggagctctacacatatgtttatatatagttctcggccaaaccaatgtgctttgtcttcaaaccctttaacaaaaaaaaaattgtgctttgtcttcaacttttaaaaaaaaaatgaaaaaattaatttgtccaaaaaaaaactctaaatgtagtcaattatatggatatatattctaatttttgtaatattaaatgaaaatattttctaatatgttatgtttctaaatttttacacttgttaccaacttgaagattaaactaattatagtttttttctaacatcaaattaattattaagcaaaaaatttcttataacaatcttacttttttagtcatttttattttaaatttcttccaaaatttaataaaaatcgattacattctttagaaaaataaattcagttaatactatcaaattgtattatttcaaaaacacttaaaaattgcacacttggcagcttatagttttcgattgatgtactttttacaataactcttttttaaaaaaagtttataacatcaacaagaaatttagtaattaatgtttaatgagattttcttttatagatttttttcattaaactttacaagtcgaccatggcattgtccctatgggatccactaatattataaagaaaatctatacaaattaaccatgaattctatataaacctttttttgtgaatatatttatgaagtttgtgaatatttaatatttttttgtttgacctaataataacagcagaaatcgacgtcgatacgaaaatatatatatatatatatatatatatatatatatatatatatgaaaaaaatgaaaatgtgtcatttatctaaaacgaaaaaaaagaaaagaagagaagcttttttagttctctctgcccaatggagaaaagaagaaccagagattgccaaatcatcttctgcaaaagcacccatcaaagaaattacttgtaaatagaaaacaaatcatcaaatctggaagacaaatcattaaaaaaggcgacaactttttttggttcagattttgaaaatttgattttttatttttcttatcttggcgatcgaatcctatccgaaagattgaaacttgggaggtgggtaagtgagtgaatggcgcaacaagggcagggaagcatggaccctgctgttctcgacgacatcattcgtcgtttacttgattaccgaaaccctaaagctgggaccaaacaagctatgctcaacgattctgagatccgacagctttgctttgtctctagagagatatttcttcaacagccttgtcttcttgagctcgctgcccctgttaagatctgcggtattttacttctctctcgatttatcagtttttttcctgtttgggatctgagattcttcaattttcatgattgtgtaatgaaaaaagtttgcatttttctgtgaggagatgagcttagatcattaaattggacctcatgaggttgaataatgttaagctaaaggagcaatgtatctttttaccaattgatgtcacttaataatagatgtctttgttgggcttaccctgttcatggagtcttggaatttgcgtaagagaatctagtttagtcattagaatgctaatggtaatagagcttgtatggtcacgtgataggaagcaagttcttcttgatcttttcttatgaaaatgcattggtttctctgcttgtattcaaacaccattaattatggttcttatgggttcataggttgatgtgtaacatttgtctttaggcgattgatagtcttgaaatcttagagactcggtttctggttaatacctaggttgatgttgtagctttttgtctttgtattgttgcaggtgatattcatggtcaatactcagatttattgaggcttttcgagtatggaggtttccctcctgcagcaaactacttattcttaggagattacgttgaccgcggaaagcagagtttggagactatttgtcttctgcttgcttacaagatcaaataccctgaaaacttttttctcttaagaggaaaccatgagtgtgcatctattaacagaatttacggattctatgacgaatgtaaacgaagattcaacgtgaagctctggaaagtgtttaccgatacttttaactgtctccctgtggctgctgtcatagatgaaaagatactttgtatgcatggtggactatctcctgagttgatcaatgtggaacaaattaagaacatagagcgtccaactgatgttccagacgctggtttgctctgtgaccttctttggtctgatcctagtaaagatgtcaaaggctgggggatgaatgatcgtggtgtctcctacacttttggtgctgacaaagttgctgagtttttaataaagaatgatatggatttagtctgtcgtgcccaccaggttagtacattgtataaatgtttcctctagtttttttgtttgggaaatcgaatctgctgctcaagaacctataatgctcccacaggttgtagaggatgggtatgagttctttgctgatagacagcttgtgactatgttttctgctccaaactactgtggtgaatttgacaatgcgggtgcattgatgagtgtcgacgaaagtttaatgtgctctttccaaattcttaagcctgtggatcggaggtcgcggttcttttgaagagaaagaggtacagatttgagtgtttctcaaaaaccgttgaacttcctctttgtttcagaatctcagctagctatatcagtttcatctgcaatattatagttaaagttcatgcatctcataataagtccataactagctttcatcgaatctcatgtttcttaaattttcgattctgatagttgctcattcgacttacagcgagtcaaagagcttttaaaagtttgtttcgcagtttccatgtttcatcttttttgagctttgaaagcgttgttgctcgtctgagctcttacaagttcacaaatttgcttttgcagtccttcttaagttataaccctgattcaaatcttatgggaagaatgggaggagaaaaagcgacgacggatgttggtggcggataattctgaacctccacgagtagtctccgaagttgcaaaagcaacaatatatatatttacatggttatatcatctctgccacttcttttgaatatgatcttgtttcttcaactcaattttttgctctgtttccttctctgttctttcacatgtcagagatacaaatcctctaagtgtatataatactttatatgtatgtatcagaacctcactgcaggatgcttcagttcatgattcttattaaaacagagggttctctagacactaattagcagcagatttgtaattgtggctgtggttttctctaattgactccacaatcatcgcatgtatacgaccactccttaacatatatatttacctaaaaagataatactatattctaatcaccccacgctggcgatgcttttaaagttcaattcattacatactctatagtctatgttatcgttattgaaatattcagatcaccatgccctacgaaatcaacactttaaattaaaatgttaataatcaacgtataaaatttattctgaccgttaataaactgttaataaagtatcatagagagccattctcactttgaaaacgttttactatgagtatatggtgtcgaatggttaggctatactaaccaaaacaaatggaaagtatacacatagtaatgcaattgcaaatatatattttaggctataataagcaaacgttttcaacccaacttttgctctgctttgttctcattctctgttatttcacatgtcagagtagatacaaatcctctagtgtatatatactctatgtgtatgtatcagaatactgctgtcactgtaggacgtttttgttcatggattcttagtaaaaccgagggttctctaaacactagttagtagcagttgtagctgtattcttttttaaagggctttgttttatctgtcacattgcaaacaatgacgatgagacaaccctaatggagaacctgctggagcacatttggttgaaaccctaaatcctggaagaacacttaaactggagaagatccagcagcagatcgatggctttgtcgttttcaatgaggttgcttctaacaacttgtagaaagatattacaatttaataaaggccaaagataacaccttcgtcacgtacataggatccgcacaagtggaagataattcaaatagtctacgtttaataaagattagagtaatggttggacaaagtaccgtatagttaggatcaaattatttaacaaagtattaattagtattgttaatgaattaaactcggaaagtatcgattgacatggtgagacatagctgtctctcagttgacatcggcaaaagaatatttttcaagtggcctagtgataatttaaaatatatggatatatctataaactattttacttagatcatcaatgtaaattgtgaaaggaaaacaaattcatttttcttgataataacattgagatcactagagaagagagattgaggtttgattaatttagtgaattcagcatggaaaaagtggtgctacgggttcatgaccatcctttgttaccctttgaacgcttttattttggccgttgttccgggtgctcacgtgaaggctacttttatggaggctaccgttgcaatgagttggcgtgttttgcggtgttccataaggagtgcgctgagtccaaacccgagatcagccaccatgcccatcccaagcatctgcttaagcttggcaatagacgtcaacgttgtcatttgtgtgaacggccggtgggaattggttatttttgttcgatatgtgactttggtatgcatttggtttgtgcgaagtccccaccactctcacttcagccacaactctctagtattgagaattacaaggtgcatgaacatcctcttaaacctttcaaaacagcatggcttgcagaaactggcaattgcaaagggtgtaactacattatcggcaatggagatagcgctcctttttatgaatgtcgtcggtgtaaactttacattcatgtgacttgccttgagctctttttcaccacagatgcacgccacaactctcatctcaaacaccctctcaaatatctcaaaaatggacccccgagctacgccgaccataaatgccttctttgcggaagagagtttgaagatcaacaaggccaaaaatatgagctttatcactgtgatgtttgtaacttcagcatatgcatttcttgtcagggaaacccaccaccactagttgttgttactccgaagacccacgagcatcaacttcacctcattccaagacttcttgattttacttgcaatgcttgtgggacacaaggtgaccgaagcccttatttttgtcttcaatgcaatttcatgattcatcgaggttgtatcgacttaccccgcatcataaacatcaaccgccatgatcatcgcatctcttacatttgtcatctcggacaagggaatttgaaatgcggagtttgccgcaaaacagtggatgggttctacggggcttattcctgctcgaaatgttctagttacgttgttcattcattatgtgcaactagaaaagatgtatgggacatggtagaactagaaggaacaccggaagaagaagaaattgcgccattcgaggtggttgatgagaacacaataaagcacatgagtcatgatcatgatttaatattcaacaatgatggtataaatctccatgaaagcaagctttgtgaagcatgcgtctcccagatcaatactgatccgttctatagttgtgagctatgcggttttattttacatcaaacatgtgctaatatgcctaggaagaaaaggcatgttttgtgcaacatacccttctctctacaaacagacgatagcaaggattcttcacgcctaagaagaaaatgtagtctttgtctccaacatttcactggatttgcgtataatctgcatattgcgtataactcgcgtaccgaagttatggatatacgatgtggttcgatatttgaaccatttgttcatgaaaggcatccacatcctttatactacaagttcttcaccttttcggcggttgcgaagtgcgacatctgtcacataacaagaaggcatttgttatgttgtgaagagtgtgactttaggttggatttcaggtgcgcaactttaccaaaaaaagtaatgaagcaaaggtacgatgaccatccacttttcttgtcttatggtgaaaataatgtggatggtgaatactggtgtgacgtatgtgaaaaaagggtagatgcaaagacatggttctatacatgtgatgcttgtggggtcactttacatgtttcttgcgttgtgggtgacttctcctatcatatgccaggaccattatcaaccgtagttagcgaatacaaaatggtaccgcccgcggtagtaagcttatacaaagtggtgccaaacacttcgatttgtagaccactttgctccaggtgtcacactagatgcaaactcccttgcattcttgaaacctccgaggatggtgttaatgtttacttttgttctaatgattgtcataaaaatccttgggagtcgtcgtattattagtagcgcacttggtttatttatttctttctattttcttatttacttttcaaagagtattttactttacgtttattattaataatgataggttttgtttgtgaaacctatctaaacaattgagagcgttgaaggattttatcgggttaggccaagggatagttctcttgggagagtttttctcttgttatattatcgttttgtttatctactatcataataaaagttttggttttgaattgcattctatcttgtacagttatcatctttcttttacccaaaatttgctttgctttcttttcattctctacattttcacatgtcgatatatgaatcccctagtgttatatgtacaatttatacatatatgtatccgacatgcactaaagggtacttccattcatggattcttatctaagaacactaacacttaaaacatagtgttctttactagtagatgttgattgtatatggagaaagcaccgaatatatgctctggtttctccgctgtttcacctctggtagcccaatatttaaaattataaaaatggcatctatgttttgatttcccgagtgaagaaattttttaggtgttcttcaggatgcaagcttccttatattcttcaaatacaggaaacttttgttgtaataagtgttgtgggaacactcacaactattgtggtcataatttgttctcaatagttgtagtgtatgatgatagtaatgttgtgggaacacttaatgtacagtttctatcgttgtttttctcttttgccaacctccgtgaataaaagaatgttttacataaattatagtttttttaaatacttgcatttaatttgatcaaatcagtatagtgctttttatataattaactagtgatcaaactaatttattcaacaattttagttatactgtcttccaaaagcagtgataaatttaatcttatggtactttctttttttgttgctatcggaggtttcttgcttaacaagcaagtagcgttcttctcttaaactatttcccctacgtaagccgccaaacatgtaccgccaaagcagcttcatcataacaatagattcatggtttttccgttttcaaggagtttgctctaggctctagcaaattgtattaatattctacaatttaataaaaggcaaaataacacattcgtcacaaacataggatccgcacaagtggaagttaatataattaagattagagttgtaattgggcagactataagtctataacgtactattaggatccagtgatttaataacagtattattgtgtatttttaatgaattaaaatcggcagaattagctgtctctagtgggatctgcaaccacggaaacagcagagaaactagtggcatcgacaagtaaaaccccgttgctcttgtgttgcttgtatctcaagaaagcacagttcttcgctatttcgcctccgggaacccaatactcacaccaaaacctatatatgtgcaagatgacgatcgttttgttctcccggattaaattggtagccaactagctagctcgtacgttgaaaataaaagtcatgaaagggccaaaaaaaatcttatcactaatcttggatctactcaagtggatgattgattatacataataacataaactataaagtagttgtatggaatttctataattctatgagtacgatcaaaatatttaataacacagataactattatagagacgacttttatttggagtattaaaaatgaataattcccggaaagtatggatgtatgtctataaattattttcttcgatcgagttgagagattgaatcgttacagcaattaaaaatctcattccatttaagaaaaaaaagaaaaaaaaaaaaaaaagtcaccttttccttcaaatcacaagagattaggttgatttggatatcattccgcgatggaaaaggtagagttaccagttcacgagcatcctttgttcatctttgatcggatttgtatggacacttgtaaaggatgcagtgtttttggttatttttacggtggctatgtttgcaatgaggtaggttgtgataccctcttccataaggagtgcgtcgagtcggtaccagagatcaaacacccttcccatcctcaacatcctctcaagctcaacctgaaatgtggacggttttgttgtagtttgtgtataagtggattgcaagttggttatcattgttcaatatgcgacttcaatgtgcatttggtttgtgcaagaagacctccatcctcaacttcatcctcatcctcatcttcgccgctacctactagtgttgataattccaaagtgcatcagcatccacttctactctctaagaacgtggagacgttcttactaaaggaagggcgcaattgcaacatgtgcaacacgaatatcaaaatcaatgaaaaacaactttgtgaatgtcgtctgtgcaatatccttttccatttggattgtgtcgggctcattccaaacgtataccaaacttctcatccgaaacaccctctcaagtttctccaatacggagcaccagagtatgctcacgagaaatgccttctttgcaagaagaagttcaaaaagttatctaacaactatgatcgagtttaccactgcgatgtttgtaatgtcaccatttgcaaggattactgtatggcgaaaccaccgccagtttctgttgtgagtcctacgacccatgagcatcaactccaccttgttccaagactagtcaattttacttgcaacgcttgtgggacggctggtgatcgaagtccttatttttgtcttcaatgcaatttcatgatccatcgagcttgtattgatttaccccgcgtgataaatatcaatcgtcataatcatcgcatctcttacactagtcttcttggacacgggaattggacatgtggagtttgtcgtaagaaagtagatgggttttatggggcttattcttgctcgaaatgtcctagctatgctgttcatgcaagatgcgcgacgagaaaggatgtatggtacaaagttgaactagaaggaacaccggaagaggaggaaattgcgccattcgaggtggtcgatgagaatctgatcaagcacttcatccatggccataatttaagactcaacaaggatggtaaccacgaaagcaaattttgtgaagcatgtgcctccaaaatcaataacgatccgttttatggttgtgagcaatgcgactttattctacatgaaacatgtgctagtctgcctagaaagataaggcatgtatccaacaataaacctttaattctatcgacagatacatatttgaaagattctccacgccaaagaagacattgttctgcttgtttccagaatttcagcggttttaggtacgaaactcagtctcgtaatttgtttggttccgctactctagatgttcgttgtagttcgatatatgaaccatttctccatgaaagccatccacatcctttatacttcagtcttgagggggatacaaaatgttctgcatgtgacatcacatatagcgccagggatatgttgtgttgtgatgagtgtgaatttcggttggacttccgctgcgctactttacctagaaaggtaatgaatcagaggtacgacgatcatcctctctacttgtcttacggtgaaaataaggaagatggtcaactttggtgtgaggtatgtgaaacaaaagtagatccaaaggaatggttgtatacatgtaatctatgtggaatcattttgcacatatcgtgtgtcgtgggagacttctcatatcacgtaccaggacacatttcatcgaacaaaatcgcaaatggagtagtggtacccaacacttctatttgtagaccccattgttctaggtgttcttcaagatgcaagcttccttatatacttcaaatcaacgacttttacttttgttctaataagtgttgtgggaatactcgcaaccctaggggtcgtaattactactaaacaatagtagtgtatcatgatactaataatgtactgtttctatcgttatttttcttttaagccaacctccatgaatgaaattatgttttacatgaattatatattatatatgtttttaaaaatactcttgtatttgatttgattgcatataaattatttcctcgtgaatcaccaagggatatagaatcaaataattgttaaattagcgttacattgggtgattggaaatggatctcgccagaatactggtggcccgcaggtggccgccgtggaagaaaattattcccggcgcaaaagatgcctcgtaaacttagatcagcccaattcaaaactaaccaaatatgggcctaattcaagaaggcccatttctaaccacgtgattggcacgtgtaaaccaaccaacggaagtagcagagaaaactagtggcatcggcaagtaaaaagcccctctctttattatcgtcgatccaaaaagcagatttgatagaaaagccgcgaatttttatgtttttctttgggaattttccggtaaactcatcggaaaaatgtttctgtctcaccctcctcaagtaatacaaccaacttatcatacagttaacttcttacctcgctctcctctgaagccaccgtcgtgttccgttgctttaaacaatccttcaatttcctccggcgccggagctaaaatctctaataatcagctaattcaatcattgtgcaaagagggtaaacttaaacaagcgattcgcgtcttgtctcaggaatctagcccaagtcaacagacttacgagcttctgattctctgctgcggtcatcggagctctctttctgatgctctacgtgttcatcgacatattctggataatgggtctgatcaagatccttttttggctacgaagcttattggtatgtactcggatttgggttctgtggattatgcacggaaggtgttcgataaaacgcgtaagagaactatatatgtctggaacgctttgtttcgagcccttacgttagcaggtcatggagaagaagtgttgggtttgtattggaagatgaataggattggagttgagtcagataggttcacatacacttatgttctcaaggcttgtgttgcatcggaatgcacggtgaatcatctgatgaaagggaaagagattcatgcacatcttactcgacgaggttacagttctcatgtttacattatgactacgttggtggacatgtatgctagatttggctgtgtggattatgccagctatgtgtttgggggaatgccggtgaggaacgttgtttcttggagcgctatgatcgcctgctatgcaaagaacgggaaagcttttgaagctctgaggactttccgtgaaatgatgagagaaaccaaagattcatctccgaattctgtgactatggttagtgtgcttcaagcttgtgcttcgcttgcggctttagagcaagggaaattgattcatgggtacatactcagacgggggcttgactccatattgccagtgatcagtgctcttgtgacgatgtatggtagatgcggtaagcttgaagtgggacaaagagtatttgatcgaatgcatgaccgggatgttgtgtcctggaattccttgatatcaagctatggcgttcacgggtatggaaaaaaagcaattcagatatttgaagagatgctcgccaacggggcttccccaactcccgtaacatttgtcagcgttttgggagcttgcagccacgagggtcttgttgaagaaggaaagagactgtttgaaacaatgtggagagaccatgggataaaaccacaaatcgaacattatgcttgtatggttgatctgttaggtcgggcgaataggttagacgaggcagcaaagatggtacaagacatgaggactgaaccagggcctaaggtttggggttcccttcttggttcttgtagaattcacggtaatgttgagcttgcagagcgggcgagtagaaggctctttgcgcttgaaccaaaaaatgcagggaactatgtgttgttggcagacatttacgcggaagctcagatgtgggatgaggttaagagagtgaagaagcttctagaacacaggggactgcagaagctgcctggtcgatgctggatggaagtgaggaggaaaatgtactcgtttgtctcggttgatgagtttaaccctcttatggaacagattcatgctttcttggttaagttagccgaagatatgaaggagaaagggtacataccacagaccaaaggagttctgtatgagcttgaaacagaagaaaaagagaggatagtgttgggacacagtgagaaacttgcgttggcgtttgggctgataaatacatcgaaaggagaaccaatcagaatcacgaagaacttgcgtttgtgcgaggactgtcacttgtttacaaagttcatctcgaagtttatggagaaagagattctagtcagagatgtgaaccggtttcatcgattcaagaatggagtgtgttcttgtggagattactggtaatgcatatggggacttatacatttgcttgtgtgtataataagcaaaggagagatctcgacttgagttcttggacttaggtcaaagaaataacaaacaagttaggcttagaaatttcctgttatatatgccaacgaaatctgttgggttcattgttactatcatattgttcttcaataaacaaaaaaaaagtatctcactttcattgtgccctcaaattcgaaaaagaaattgtcttctttttttttggaaagaaaaaaaatggaaacaaacgaattgacattaattagtttaaacatgcaatataaaagaaaacacaagagtctaaaaacacaaacacaagaaagaaaacacaagagtagtcagtttctgcacacgaacacaagaaagagatattaaagatgccaacggctgcgatcttaattctggcgtattctgcatttgtttgggttttgataagctattgtagcagccggaacaataatgtttcgaagaagattgctaccagaccaagcggcataggattaggaactggaacgattttcttcataatcttagccctaatggctatgatgttcttaaacaacaacgctggacgaattcaacacggtatcaatgaacaagctgatgggatttagattcttgtaatcatctttttctttctcttcatgctttatctcaaaggcggtttttgatttctttgttttagtttggattatgtattttagggattaataaaatatacattcggatgtgatcttcttcaaacttgtattaagaatttaattgaggtgaatcaaattaaaaacttgtgttatatcaagggatttaaagagagaatgatggttttttatgtataattttgtcatacgattacagaattttaacttgaaacagaaggaaagagaaaaaaggaaactgtacggaacttcaaaaggacatcgcatatggccttttcaatcatcgtcgatgtagatggtctcttgcttaaacaatcctccgaacactttcctcacctctttctccggcttcttcggacgttcttctttcggtttggatgcaaacggagatgatggtctctgcttcaccactgctttcttgggtggcaagtttctcgcttttgcttgtcctctgaccgtagcaacctgtactttaggcgtctctgaagcgttctgaatcgcagttgcgaactgagagccgagtttattccaggagagacctgagctgatatctttcgccttgttaaataaaccgtccactgtgactcccacggcatctgctttctgctgcgcatcctcagctaagcttgcagcttctgcttctttctcagagagcttttgcatttgcttctcaaactctttcgctgcttctgctgcctctcgagctttgtcagctgcaactttagcttcttcctctgctctttcccttgcgatcgcatctgcgtacacttttctcctcccatcttccgggattacactatcattaattcatagataatgtttcattaaaagaagttaacacaaacgtttatctaagctagaaacactctatcgatcgagaacgcgtttaaatccgaattcgctagttttaagatcattatattattccaatgacttttgaatcaatcaacagaggactcatttacctgaaaagctcgtccactggccgcgatggtgctgatggatctgtagaaacttccaccacctgcaaaaggacacacaaaacaaagccgatgcttttgagtgaaaacacagatataatttaattcaacggagataattcttgccctagtgtctgcgtttgtatgatgaacaatcacaaacttgactggtaagttacttgtgctatacgctaccttattttctgccacggccgtattcgcaaaaatgtctgcaaccagcgacgcaatcttcaacttcggaacctggtcacaaacagaacatcaaaacaagttaataaaaccattaatcaaaaccaatttataaccaaatgatttcgtttcaatgtaatgtatgataataatccctttttatcgcatacattacattactttgtaggcctcggacgaactactgccactgccgctgttactcccttcagctgaaacgacgacgttataagctttctccggagagaaatcctccgtcaaactcgtctttatgagtgtgtaggccacgtcggtttgagctactttctcgatgaggtcagagatagtcaatggctgagattttgcgaaaagattgccgaaaaacgaagtaatcccgtcgagcacgttgtatgtggacccgctgatggtgccgtcgtagactatcgccacgtggcttacgccggctagctcagctgcttggaccacgagcaatgcgtctgaggtcgaaacttgggcgtccggaccattctctgttgccccgaccgtaacaacaactttggttgcgtttccaatcgcttttgctattgattcagcgtcttggaagggggattgaactgcgtttagcctcttgacttcatcatttgataaaatctgttgaaaagctgatcgtcaaaccataaatcaaagctctaaacgccaccaaattcgtaatcacacgttaatgtgaattattacgagtgacacactgacatacagtacttacataacattacatgcgaagttaaagcaattattaataccaaaccgagtttgcgtatcgctaaatcttaaatccaaagtgcgattgcgaccaaatatcaagatcaacattatcgcgtttagaaaattgacagattatgaattaaaggacttaaaaacaaaaccggaccttgtaagtagccgcgacacgagctaggtcctgggcagctccaaggtcaggaacaccggctcgaacactgaatcctcgttgtaagagcgtttgagctatgcgtataccagcttgtcccgtagcaccagccacaaaaatagtaccaggatctttctttctgttattaccaaacactaaaccggtagaaggattcgtcacaaccggtatcagtgacttcatgtccggtaacttaccgaaatcaaactggaacgggttcttccctttttgtttcccctccgagtcatcatcacccttcgttttcccgagttgaaacgccgtttgcttagcccacacggttaacctcggttttctccggttaaacctgacaccctgcggtggcgcggtggttaacgggaatgaagttgaacttgaagccattaagaggaggtcgacgagcttagacgttttgcttgtacctcaagtaaacaatgtggatgccatacattgaagatgagacaccatggcgagtgcaaaaaagactttcgttgtttgtgttttttacggatgatgcttttgttatccagaacagattcatagccaataatagaatgccacgtcattaacatatcttgatgtggcttggtctgaacttttcgccacagaatcttgatcctgcgggcccagatattaaaatactttcagctttgctacaatattttcacgtaatatcatttgtatccaaaatgaaattaaagttaaatcagaatttgatatcggttttgagggatcagttaaatcagagaacagcgatcaagttaatagagaaaatcatcgaatttgagactgtttatatttattatatttttctatacaaataaatattcctaagcaattgtgttttgctaatgaacttttcaactgaatgaagaaactgacatttccaattcgaacaggaaccggaagacacgcgctgattaatctaaatcggaaatctgaagaaacggtttaataaaaactgggacattcagttagagaaatctattgtattggttttttctcctcgtcttcctctaaaaaccttcttttatcggtttttgcactaaccagactcagatgctgcaatttgcagtggttttgtatcatcgtagcaaaaacaagccggagagaatctcagaaaattcaatagatttttattcggttagtagttatttgcaataataatgtaaaatatgtatgtgtctcgttaaaaaatttgatgtgattgaccgtcatgcataaaaagaaaaaacacttaaaattaaaagttgacacttatataatcttagatatacgtattaattaaaatataaatgatctaaaatgtgctgtttttcaatattaatttgaatacaatattttcaaaatatcaaaactactcttatatttttgcaacgtcctagcagattttctgtagatgatataaatttcaagttcggtatataaaatagattcacaacgtaataaatcctaatataaacccatcaatagtgggccaaatatcatcaacgaaagttaaaatgattccaaaaattaactatcaccaaatcttgtgatccttaaatgattagatgaataagaaatctaatgtttggttcatggtatagattttttctttaaaaactcaccatgtaaacccttatttataaatatgatcatcaatagtcaagtttgactttcatatgatgaattgttatgaaatcagattaaagtattttgcaaatgaataatatatgtatgtattaacttttaatgaattaatatcataattggattatatactataaatatattacattatgtgatttttgtcaaaaattattcacaagtttgtgtatagttgtaagataactggaaaattttaactgccctaatctaaaatttaaagaaataattgatgtgtcactattttaggttatgagtggatgatgtgttttagctctaagactgttcatctttccataattttctcaacttcatctctgatatacctcgattttcactgcttttagctatgatctaggtatagtttttagagttcttttgttatttgtagagtcttttctagtctttttcaagtctttacatgtttgggatgcatttggagattatggagcattcttgaacaaaacatacaacttaggctgtagaagcaatcctgagacgaaaattgacgtaggtgtcaatcgacacaacccctggtgtcgagcgacactaatacttgacggcaattcaattgcgcaatttattgaagttttgaagattataaaattcggcctagaacgtttccttattttcaagaaggcccgtcacgttttaggaacttatatattgaattttatggtcattgtttagacctaactcttattatctcttttattcttgggagcaaaacccggtagagactccctttagagaagattcttctaaactcttttctcttcttaatttcatcattgatttcttattcaatcatgttttgttcttctatgatcatgcttgagtagttctttgttgggtttagggattctcatttaggatttggatgaactagtagatcgataaccctgttaggataatatatttagaatttttcatctttgattgttcttaatgttagttttagagtaactaactagaacttgattttaggataataggtatacgcaccatatgtatctattactgaaactatcttagatgagcctactatttagatgcgtgctagcgtcgattacttaggtgaatttatcaaacctgattataatgcttgcttaactctagggatttacaagagagttgggatcaatactattaagcatagtgagtttcgcggaacaccaccgcttattgtatattagtgatttgagttctagaatggttcgttaataatcctagtttactgctagatctattattatgatatttcctgagaattttcctaaacccaacgttttaatcatttgaatctacaaccaatctcatttattgttttcttgtcttttacatttataatattttctgtttagctttattcaaaactattaatctattgtgtgatccgagaactttatggaattctatccctaagtgctacaacaacctctttatttgagagagtagtcattagggtaatttgatcatatcaatctccattaacaaaagaaagatgaaagattttcttttgtcatgaatatgtgcatcttcggctgaaacttggaagggacgaaagttcagttttaaagtttattttgtgtacacactttcatgatttattgtcttgaactcttgttgtgtgtttttaccttaatttgtaaattggtaagagcaaaatatttggttctaaatttgtaatctgtttcttcgagaccattattttgtgttataaaattttaatttcatttactaatctttttaggttttctattgttcttgggtggtagcggaccttgtagttcacacaatcacacgttcttcctaagggttaaatccaggttctgttcttccttttacttgacatttagattgcatcttaaatggtcaattacctaggtatcaaaagaggaaaaaaaaaacaagatgatttgtttattgaatcacaaagagattctttagatagatttatgaaaaaagaagtgctcatgaaaattctaacgttctaacgttgctaatgaaaaccctctttttcagtcaaatgatcattttgatgatggcactagtcacttgagtgagtatactaatgtggtaaatgcatctaatgttgaacatttgaatgttcgtcataaacgaaataaataacttaaacatttcaattaacattctctaagatagaacaacatgtaagaatatgatcaggccttgataatgtggaccttgatttcgtgaaccaaaccgtgataaccattgaccatcttaagttcgaataccacttcattacctggcttcacatgattccttcggatgatactaccgattccatttagatacacggatctgttcttccaaatcacgattcttctcttcaatatgccaatcttgtcacgcatgataaccatgttgggaaatgtcaagttgtagtcctttataagtaaagacggtatgcgctgaaaatcagaaccaatcataatgaatgacaaaccatttagtcatttgaagttttctttagtcacatttcggtttctttaccgttctattttgagtcatatcaaccggaaacgacgggtttagtttgttgtctagatgttcataaatcttatgactcttagtcttcagtttcgcacgtcttctacttgtaccacctatccaacaattaggaaacaaaacacttataaaagcattgatagaagattctcttataaacctcgaaaatgtaaagtctatttatatatacctcttcttggcgactcctcaagcccttttgtgctctcttcattccccacaagcacatcttcttcactgtccactttaatcacttctttttccattggagatctcatccttttacacattgaaccatactcgtacacgcaaaagtggaacacaccataaccatcgaactcaaactccaagaaaattggctcagtcacattctcgtccttgacgattttcttccacccgtctcggagaaacactgtgttaccgtttgctttcatttccatcctccaaatgttccccgaggacacacttttaacagttaccttccgaggaagaggcttccctgagatcttgtctgaaaccaaaggtagattctgtacaaaacaatagagaaacacacatcttactttgaacaacactaacataatttcaaaaccatatcataccaccgatggatttgtcacatcacataaacacacaacctaaaactcaaaaaaatgtctgctaaagctaaaactttcaagattgttcaatacatatcattcaaaactcggaaaaagacaagatcttgcaaaaacagaacggaaatgctctgttctaagagatttaagcaacgtattaccatgtcatccgcggtttgatttggtatgtaaactctgaaaaacttcagaactgtatcttgtatgctcatagtttccgatagcttttttttacttgagttctcttccatggccgtgagcccgtgaccgtgagaggcttgagtgttagaaagagatagaacagaggagagagagaagaagaagaataaagaagaaattgagattcgagattagatgatgagagagggagagagaaacattcaatacaacacaacacacaaagtcatgaaaatagaaacaaaacagagctctggtcacttagcgtttcaggtggttcaaaagggaaacaatgttggacgtaaatagtaatccctcatcaatttccgatgttacgtgttgatattaatagaaaaagtaaatggactaggcccataattattgggcctcactgaaaacgcccatatagttttatctaaagtcatacgtttcgtcatcgcatcatacgcgaataatttcgtcatattttctattattttgtcgtaacggaattaatcaattattttctgacacaatttttcctattgccctatggaaaatcaaaaatgcattgaattcagaagaaccctagactaaataagagatcttatgtttgcatgtggctgtggtaacagtgcagaaggatcacaaggagctacacaataacataaacctctagaagataatggaaacaaaacaagattaacaggtaaatcattatgttgttcataagtattagtgataacaagctaaaaatcaaaaactgctaacaagaactatatacaaatttatttatttcttataacaaaatgatgacaaaactgctaacaagaattataggaaaactctactttatgacataattgtaacacttttgttgaatattttcataccattacaacattacaggtcgtgtcctggccatagggtttgtattcgatctttcaatgtatacattgtgagttaaagaatgaggaaaaacagtaaagaaatgttgcgaaaaaaattataccgttcttccaatgataatttctggtaacttgtttggttcatatttttgtaggttgttgagagaagcgatttgttctgttttttgccgggcactagacgaagtgctgctacgcaagaacttcatggtacggtgttggaatactgatcccaggagtgtctggaggcatctcaggcaaaacatcatttccttcaagatagtttaccacttgggacatactaggcctatcctctggattgtactgtgcacatagtagaccaagctttagtaccatctctatctccttgcagacgtagtctccttccaatctagcgtctcgggcgccaaccaagttccctcttttccagcattgacacacccagctgattaagttaaactcttcaggcttccctggatactcaatgaacattcttccacaagcaaactcaagtagtaatgctccgaatgaataaacatcggctttggttgtcggcattcctgttattattagctctggagccacataacctacgcttcctagcattgggttcctgtttgtaccaaatcttgctagaccgtaatctagtcgcccgtttaaatcctcatccaagagtacatttgcggcttttacatctcggtgaagaacgatctgttcatgcaaataaagaagagctgaagcaactcctttgattatatgaaacctttgtgaccaacttagattaggcctttcctcattaaacaagaaatcatcaagatttccataaggcatataatcatagaccaagagtaattcaccttttcttctgcagtatcctaagagctgcacaaggttcttgtgccttaacttcccaataccaacaatctgagaaacaaggtgtttggtatcttgttctgcatctaaagaaactctctttacagcaatctgtgcattagaagagagctttcctttgtagactgtcccgttagcctctgtaccgaataactcgctctctttgaaccctttggttgctttgtagagagctttgtaagaaaacctctgaggactgtaatcttcctcccattcttctcgtacttcttcatacttgctgttcacatacattgatcttaatgctgctcccattcttagaaatatacctgcaaacatgtcagattttttgcagattctcaaggcagcttttagtcctctattgtcatcgttgtttctgtttggtgatttgtgtgttgtgggaaattagtagcagaccactttcttttcaggagaaggtcaactgttgtaccaggaccgtccattcttgttatttaatggtatttcatctctgataatggtattttattatactagtggcatttaaagtctccaatgaagattttcattatgagttatatgtaatttatattgcaacattgaacaggttcatctctttgatcacctggatgaattaaatactcaaatttttatgaagatgcaatattttcttcttattacagaagtcaactacaagaaggaaggaaacaaaaaccaaaaaatgagtaaaagaacaaaagaagatgtattagaatttcttatgtatgtatacaacagacttcagacaaaatgaatcttggttttggtatgataacataactaatagggggaaaaagaggattgaaatagaaagcctctttcttacatagaggctttgtaaacaatgaaaaacactctctgttctttagtttggttgaagtatctttccatgattttctgcttcaacaactgcagcagaatcaaatgcatcagaatacaattgcaggtgtgtcaaattgttaatagttgaggaataaaagaggaactcactttcatttgtgttggctacaagaggagctttgttgtctgctgaatttgaagcaggtgccatgtttgtggctgcaccaaaactagaagtctgagaagaacctttacgaggactgatagctttagatatcactcgagaaagttctctatcgtcttcgctaggctcaaacttctgcgatatgtattccttcattgatacgcctttgtcccatacctggttacaaacacaagatgattgactgatgtatttacctaaatgcacaaacagatagagaactttgtcgtaccttggtattgaagccagtgggctggttagttccggcagtgttgatttctgcaacatcatttacctcttcttctcgctctgttggttctggaaaagccatatcttgaatcttcttagttatagcttgagttgcgtcagagactttagcataaccaggtgctagcttctctgtcacagtttctgttactgtcttgcttggactaataggttcctgctggctcgtgcactctttccttgtcttctcagacgattctgttactattgttgttgtgtcagaatcagcaggcttctcttgcttgacatcagataaaacattcttctcagagatcacaggatgttctgttttggaaccattacaatctttttgttcttgttcagcgtcctgtttggctgggagaacagacaagacatttgtctcagtgatcacaggattctctcggggatgctgccttgctgtctcctttaactcttcaggtgccttctttgattcatacactgaaaataacacaagaagatcgatcagttttaagcaaattcctaaaagggtggttgttacttatgaagctttgttcaatttcatttacttggggctccaagatattcaggatcttcttcttcttcttctcctccttcttctctgactttacggtcttttgacttgtcacgtggtgacaatgacgcataaccaacttctctaacttcatgatcttcggatctgcaaaacggtgacatggttgcatcaccttcttcatcatgtctcttcttggtgctgagactgtgctgcagttttttcgccttatccttcattttagagaacaaagatttcttatggtgagaatgttctccatcattttcttttcttggtgaaccagaaggtgaccgctttgaagcttcaccagctgaaaaaaagtatgacaaacagatttcaaaccaagagtttgcgtccaaaatcatcaaatcactgagagtaaacaaaatggatattatcatttcttggagagacttacattggtgacgctggctaagtgttgagaagctaggatttccagaatgatcaacatgtgtttttaagctttcgagctcagcgacggggtctagttgacgcgacatttcagaaacacaaagttcttgtagatgttctgtttaggaactctgatcctctgagaacaacataagatagatataagacaagaaaaactgtgcatgtcgtcttgtttctccgaggttcttggacaaaccataagaaaaaaaaatgcttaaaatagtcatggtctcttattggagaagcatgaagggaagacaaagtcttggcctgagaaattgacgtttgaagctgaattataggactcacatttgtagagttttctagagaaaaactggaaccataaataacaaatacactgtttaaagaacttaagcaaaacttgtctctgaactttaatgaccaaaatattaagactatgtgagaaaaatgtaagaacacatttgtctggataaaatgcataagttacagaattatcacagactaaacatttttcaagaacctagtcagaagtttactcatttgtctcactgaaactgcgtgctgtttctaactaaagtaaacgtcacgcagttctatgttaaataaacaaaacgtaatgtagtctaaaaggaaagtctctctacctgcttaaaacccaaaagtacattttttcgccgaagccaaaaatcttcacttgcttcttcttctctctgaaaccttatcttctccgcccatggccgccttctccgtcaacgggcagcttatcccgacggcaacaagctccactgcttccacctctctctcttcccgtcggaaatttctctctccttcctcgtctcgtctccctcgcatctccactcaatctcctcgtgtcccatcgataaaatgcagcaaaagcttacctaaccgagatacagagacttcctcaaaggattctctccttaaaaacctagctaaacctctagccgtagcctcagtctcctccgctgcttcattctttctgttccgaatctcgaatcttccgtcggttctgaccggtggtggaggaggaggagatgggaatttcggtggatttggtggtggaggtggtggtggagatggaaatgatggtggattttgggggaaattgttttctccttcaccagcggttgctgatgaagaacaatcaccggattgggattctcatggtttaccggcgaatatcgttgtgcaattgaacaagcttagtggtttcaagaagtataaggtatctgatattatgttctttgatcgacggagacaaaccactattggtactgaagattccttcttcgagatggtctcgattcgtcctggtggagtttacactaaagctcaattgcagaaggagcttgaaaccctagctacttgtggaatgtttgagaaagttgatttggaagggaaaacgaaacctgatggaaccctaggtgttacaatctcgtttgctgagagtacatggcaatctgctgataggtttagatgtattaacgttgggttaatggtacagtcgaaacctattgagatggattcagatatgactgataaagagaagcttgagtattacaggagtttggagaaggattacaagaggagaattgatagggcacggccttgtttgttgcctgcacctgtgtatggtgaggttatgcagatgttgagggatcaagggaaagtgagtgctaggctgttgcagaggattagggaccgtgttcagaaatggtatcatgatgaagggtatgcttgtgctcaagttgtgaattttgggaatttgaatactaaggaggttgtttgtgaagttgtggaaggtgatataactcagctagttattcagtttcaagataagcttggtaatgtggttgaaggaaatactcaagttcctgtggtgcgcagggaattgcctaagcaggtatgtttctcaagttctgctatgtcagatatgtcattgttgatgtgatcatgatttagtataggatgatgacgaaagtgtagttatgttatagattgatatgtcaggaaaaaattgacagacttttaacttgaacttgctatttaagtctgatggatgtaagaggtttaattgcttcaatgaactcattgtacaaatgttttatattccagacatgtaatgatatatctcatttgttatgttagttttagtgatagtttcgatgtttcgttgaacagcttcgccaaggctatgttttcaacattgaagctgggaaaaaagctctcagtaacatcaattcattggggctgttctctaacattgaagtcaatccacgcccagatgagaaaaatgaagggggcattattgttgagatcaagcttaaggagctagaacagaagtcagctgaagtcagtacagaatggagtattgttcctgggcgtggaggagctcccacattggtatgaatccttccttactgaaataagtacagattgtaaaatttgagaagttccattgagtttgattgttattgtttatatgcatcaggcttcattccagccaggtggttctgttactttcgagcatcgaaacctccagggtcttaataggtctctcatgggttcagtgaccactagcaacttcttgaatcctcaggtacattcgataagcttacatgattgatacatctctggttcaacttttcggttgataacatccatctatttctgtttctatgtgctaagcacaaaccttatgttacattttttcctcaggatgatctttcgtttaagcttgagtatgtgcacccgtatctggatggtgtttacaatcctcggaaccgaacattcaaaacaagctgcttcaacagccgcaaacttagcccagtattcactggaggacctggtgttgaggaagtgccaccaatttgggttgaccgagctggtgtgaaagctaatataactgaggtaagcttgccaatcctcagtgccataatcgacttattttgtcctacaaacacttaactgaaacatattttcatgcagaacttcacccgtcagagtaagtttacatatggacttgtgatggaggagataacaacccgagatgaaagcagtcacattgctgcaaatggtcagagactactacctagcggtggaatcagtgctgatggacctccaacaactctcagtggtaccggtgtcgatcgaatggcttttctacaagccaacatcacccgtgacaataccaaatttgttaatggggcagttgttggacagaggactgtctttcaggtttgctttcccaatgatcaaatgagattataaggatgagtcatctgtatattgtaagctttacacaatgtatttgcaaatcacaggttgatcagggattgggtattgggagcaaattcccgttcttcaaccgccaccagttaaccatgacaaaattcattcagttgcgggaagtagaacaaggggctggtaagtcaccaccaccagttctagtcctccatgggcattacggaggctgcgttggcgaccttccaagctacgatgcttttgtcctcggtggtccgtactctgtccgtggctacaacatgggagagctcggtgctgctagaaacattgccgaggtaatacagcaaacactcaaaacaaaaacagtcttttctcctaaacccgaaaaatatgtgtgtctaatttggtttcatggattacaggtcggtgctgagatcagaatacccgtgaagaacacacatgtctacgcttttgttgagcatggaaatgatttaggaagctcaaaggatgtgaagggaaaccctacagcagtgtacaggagaacgggtcagggttcatcctatggtgcaggtgtgaaactcggtttggtccgagctgagtatgctgtagatcacaacaatggaaccggtgctctgttcttccgatttggagagaggtattaaggtaatgtgagaagcaggctcatgttatccaccttagtcttttcattttctctgttgaggatctgctatttttctcttttttccttttcttttgtgttttctttttttttttctacttctttttcaataattgtttaatgttagtgtttgatgacgttgctgagttgtgctgagaatcgggaaagagtttgttcttcgtaatatgtctagacttttgtaggaaaattttgaaactttcaagtttcaaaaaatcgtatgaatagttgacaaatgaaaatttatattggtaacacgtctgtctgcatctgagttctcttttaaaaataacgaataagggatagtgcaatagaatttaatcaaatgtcaacaccaaacatctacaaagtcaagtgtcagaggctttcgaaaacttgaaattgttgacattaggaaacaaagcatatcttcaatcttctccatattttgaaatctttcaatttgattctgttgagatggtagatgctgtcactggtttcgttttgaataagatcggcggctatctcatcaatgaagtattggcgttgatgggagtcaaagatgatctagaggagctgaagacggagttgacgtgcatccatggttatcttaaggatgttgaagctcgagaaagagaagatgaggtctcgaaagagtggacaaaactggttttagatatcgcctatgatatcgaggatgttttggacacctatttcttgaaacttgaagaaagatcactaagacgaggcttgttgagattgaccaacaaaataggcaaaaagagagatgcttacaacatagttgaagatattagaaccctgaagagaagaatcttggatataactcgcaagcgggagacttttggtataggaagcttcaatgagcctcgaggagagaatattacaaatgttagagtgaggcagcttcgacgtgctccacctgttgatcaagaagagctagtggttggtttggaagatgatgttaagattcttttggtaaagcttcttagtgataatgagaaagacaagagttatattatctccatattcggtatgggaggtctaggaaaaactgcacttgccaggaagctttacaactcgggggatgtgaagagaagatttgattgccgtgcgtggacctatgtttctcaagagtataaaacaagagatatacttatcagaattataagatcgctgggaatagtttctgcagaagaaatggaaaagatcaaaatgtttgaagaggatgaggagttagaagtttacctttacggtcttctagagggaaaaaattatatggtggtagtagacgatgtatgggatccagacgcgtgggagagcttgaagagagcattaccatgcgatcacagaggaagtaaagtcatcatcacaacgcgtattagagcaatagctgaaggtgtggaggggacagtctacgctcataagttaaggttcttgacgtttgaagaaagctggacgttgtttgaacggaaagcattcagcaatattgaaaaggttgatgaggatctgcagagaactggaaaagaaatggttaaaaaatgcggtggattaccgcttgctatagtcgtgctttctgggcttttgtctaggaaaaggacaaacgagtggcatgaggtgtgtgctagtttatggcgacgcctaaaggataactccattcacatttccactgtgtttgatctaagctttaaggagatgcgacatgagttgaaactttgctttctttactttagcgtcttccctgaggactacgagatcaaggtagagaaattgatacacttacttgtagcagaagggtttatacaagaagatgaagagatgatgatggaagacgtggctcgatgttatattgacgagctggtagatagaagtttagtgaaagctgaaagaattgaaagaggaaaggtgatgtcttgtagaatccatgatctactgagagacttggctatcaagaaagctaaagagcttaactttgtaaatgtttacaacgagaagcagcattcttctgatatttgcagaagagaagtggttcaccatcttatgaacgactattacttgtgtgacagacgtgtaaacaaacgaatgcgatccttcttattcatcggagaacggaggggttttggttatgtcaataccacaaacttgaaactgaagctacttcgagtgctaaatatggaagggcttttgtttgttagtaaaaatatcagcaatactttaccagatgtgatcggggaattaatccatttgaggtatctagggattgctgatacttacgttagcattttaccagcttccatctccaatttacggtttctacaaacactagatgcgtcaggcaatgatcccttccagtacacaaccgatcttagtaagctcacatcactaaggcatgtcatcggaaaatttgtgggagaatgtctaataggcgaaggagtaaaccttcagaccttgaggtctatctcttcctacagctggagcaaactgaaccatgagttactcagaaatcttcaggacttggagatctacgatcactctaagtgggtagaccagagaagagttcctttaaactttgtttctttctctaaaccgaaaaatctccgtgtcctaaagcttgaaatgagaaacttcaagttatcatcggaatcaaggacaacaattgggttagtggatgtgaactttcccagtcttgagtctctgacacttgtcggaacaactcttgaggaaaactcaatgcctgctttgcagaagttacctagactggaagatctggtcttgaaagattgtaattactcgggagtgaagatcatgagcatcagtgcacaaggttttggtcggttgaagaatcttgaaatgtccatggaaagaagaggccatggattagatgagttgcgaattgaagaagaggccatgcctagtttaataaagctgactgtgaagggccgattagaactaactaagctgatgattcctgatcgattgaaagcgtttgttcgacgcaactaaaatatatgctgatgactgctgaaaggaaaaagctaaaaatgcttttataaagtgtttatttggtatttgtatatttcccttcttggttatacatatgtattattcttatcagcaaaaatgatgatgaagaaacgagttcactagcaggagacgaaaggaaaatattttaggtcgtcacaagactaaaaatcatgtttatcattacaataactttgctgatacataacgaaaaatgtgaatccttcacagattaaacttgggacatttagaggtcaataacttatctggctatactaactatacaataataacaaacctagcttttgttggaatgtcactttcataattcggtaaaatgttcgttagcgtgtggctatccaacacaaaggaaggttaacttatatgttaaagaatgcaagaatataatacgttagttgtatatattgtcaatcatatacgccagaaaaaagaatacttaatggtatactaatatcatcttcacagcctgtaaccatgccgggtcaatagatctgagactaaaacttttccattaattaatttcactagttgcaccgtgatttgaggattaatgatgtagcatgtggtaagatcttctttaccaaacaagtgacgtgtcaacctttatgtagaaatctttttcatggagatacaaagagagatagaaagatagaggacagagaaatatataggggttaaggaatggagaaaaatgcagagaagaaaagaatagtgttggttccatttccattacaaggacatatcactccaatgatgcaacttggtcaagcacttaacctgaaaggcttctcgattaccgttgctcttggagattccaatcgagtaagttctacgcaacacttccctggttttcaatttgtcacaatacctgaaaccataccactatctcaacacgaggcactcggagttgtcgagtttgtggttacgctcaacaaaacaagcgagacaagtttcaaggactgtatagctcatttgttgctgcaacatggaaatgatattgcttgtatcatttacgacgagctcatgtacttctctgaagctacagctaaggatttaaggattcctagtgtcatattcaccactggtagtgctacaaatcatgtttgttcttgtattttaagcaaactcaacgccgagaagttcttgatcgacatgaaaggtactcaaaacctagcttattaccgattctgcaacccttcctttcactcatacaaagatcttttttactttacagatcctgaagtgcaaaacatggtggtggaaaatttacatccactaaaatacaaagacttaccaacttcaggaatggggccgctagagcgatttttggagatttgtgccgaagttgtcaacaaaagaacagcttccgctgttataatcaatacgtcaagttgtctagagagctcgtctctgtcatggctgaaacaagaactcagtattccagtgtatccattaggccctcttcacattacaacttcagcaaattttagtttacttgaagaggacaggagctgcattgaatggctgaacaagcagaaactgaggtcagttatatacataagcgtaggaagcatagctcacatggaaaccaaggaagtattggagatggcttggggattgtataatagcaaccaaccttttctatgggtaatccgacccggtacagagtcaatgccagtggaagtcagtaagattgtctcggaaagaggatgcattgtgaaatgggcgccacagaatgaagtacttgtgcatcctgcagtgggaggtttctggagccactgtggatggaactcaacactcgagagtattgtggaaggagttccaatgatttgcagaccgtttaacggtgagcagaagttaaacgcgatgtatatagaaagtgtttggagagtaggggttctgcttcaaggagaagtggagagaggatgtgtagagagagctgtgaagaggttgattgtggatgatgaaggtgtaggaatgagggagagagcccttgttttaaaagagaagctcaatgcctctgtaagaagtggaggctcttcatacaatgcattggatgagctcgtccattacttggaggcagagtatagaaatacttgaaaacagagtaaatctgaagaatttatgtaacataaaggataaatcatgatttttatagatcaagcttgattttttaaagaaagaccattgcatgtttaatcctgaaaagcctttcctactgtataccacaaacatgaggcatgtatcaaatttgtcgcaacaagagatatttctagtacttattttgagctttgtaattgtatgttagcttattttgtattatattatttttctagtagagacgactatcttgatttcataaaccaattaatatttgccaagtattctttatagtttgagctaccagttaccacttgtatttggctctttatatatgtttatgaaaagattgaaacattcacaaaagaatcgtatgaatctaaatatacatttttgcagttattttatcaaataaattctctacttggcacttaattacattgacatgccattaaatttatttacttgaattaaaaatcctgcgattaatacttattacttaaaccgattatacccaaaatatatagcattttctttactctagcaacacaaaataaaatcatagattttttatcttacctataagattcacgaaatcttaaaacaatcaaagtttgaattatttaaattaaatttctacgaataatttgcaaaggattaaaacaaaaattgtgtaacaaaccaaaaaacatgaacgattttgtaaactattattattttaaatcatgtttacaaaactacccaaatttaggttattaaatgacgtgaaaaaatccaaaacacaagtatatcaatcactaatagtgataaaactaaagatttatttataacattatctatagtaaaaaatgaagtacatttttagagtaattatgtcattacctaaaaggcaaaaaaatacgaattttttaaatattcttattcatatatttaaactttataaaacattattaatatttaaacttataatttttttaatatatcataacttttttaacataatcatataataatataatttatagagtttaaaaaaatctcaaaaaaaattccgtcaaattttgtgattcaaaattttaaaaatgaacatatattaaccaattggcgaaaaatgtgtgggttcaacgtcccgcatcgactaaaatatttaggcaatgatttataaacatatcataatatcaacattaataaaataaatgggtattttttacgggacgagtttagcaggacgttacttaataacaattgtaaactataaaataaaaatattttatagatagatacaatttgcaaacttttatatatactaacttaaaaaaaaaattgtccaagatatgtaccgtgagttaaaatctagaatccaaaatacataacggctaaatacatatattactcttaccacattacaaaagtcttgtaattttcacaaattatttagtctaaaatccaagatgattttttttttagaattttacataatacagtttatcgtgcttttattatatacactatacattttaatcgtaataccaactaacatattaagaaaacacatattataaccgtaaacctaaatacataatctattattcaactatacgaattttactcaatatataaattttattaaaaaattagccccgcgggtcgaaatctagtagttgacatttgtgagtttatattggtatcacgtctacttcgagctcttttaaaaattgccaacaagggatagtgcttatagaatattatgagacgatataacctgttcaaatataaaagacatacatccacaaagtcaagtgtcaaggcttttgcaatttgaaaggttgatacaaaaaacaaaacatagtttcaatcttattcatatttttagatccttcaactcgatcctgtggcaatggtagatgcgatcacagagtttgttgtgggaaagatcgacaactatctcatcgaagaagcgccaatgttgataggagtcaaagacgatctagaggagctgaagacagagttgacgtgcatccaagtttatctcaaaaatgttgaagtttgtgacaaagaagatgaggtctcaaaagagtggacaaaactggttttagacattgcttatgacgtcgaagatgttttggacacctattttctgaaactagaaaaaagactacacagactaggcttgatgagattgaccaacataataagcgataagaaggatgcgtacaacatacttgatgatatcaaaaccctcaaaagaagaactttggatgttactcgcaaacttgagatgtatgggataggaaactttaatgagcatcgagtagtagcgagtacttcaagggtgagggaagttcggcgtgctcgatctgatgatcaggaagagcgtgtagttggtttgacagatgatgctaaggttcttttgacaaagcttcttgatgatgatggggataacaagatatatatgatctccatattcggcatggaaggtctcgggaagacttctcttgcaagaaagctttttaactctagcgatgtgaaggaaagctttgaatatcgagtatggactaatgtttctggagaatgtaatacaagagatatacttatgagaatcataagctctttggaagaaacatctgagggagagcttgaaaagatggctcagcaggagttagaagtttaccttcatgatattctacaagagaaaagatatcttgtggtggtagatgatatatgggagagtgaagcattggagagcttgaagcgagcgttaccttgcagctatcaaggaagtagagtcatcatcactacaagtattagagtcgtggctgaaggcagggacaagagagtctacacccataacataaggttcttaacgtttaaagaaagctggaacttgtttgagaagaaagcatttagatatatcttaaaggtcgatcaagaactgcagaaaatcggaaaagaaatggttcaaaaatgtggtggattaccgcgtactacagtggttcttgccgggcttatgtccaggaagaagccaaacgagtggaacgatgtgtggtccagtttgcgtgtaaaggatgacaacattcatgtctccagtttgtttgacctaagcttcaaggatatgggacatgagttaaagctctgctttctttaccttagcgtcttccccgaggactatgaggtcgacgtagagaaattgatacagttacttgtagcagaagggtttatacaagaggatgaagagatgacgatggaagatgtggctagatattatattgaagatctggtgtacataagcttagtggaagtcgtgaaaagaaagaaagggaaactgatgtcttttagaatccatgatcttgtaagagaatttactatcaagaaatccaaagagctcaactttgtaaatgtttacgacgagcagcattcttctactactagcagaagggaagtggttcaccatcttatggacgacaactacttgtgcgacagacgtgtgaacacacaaatgcgatctttcttgttcttcggtaaacggaggaacgacattacatatgttgaaaccattactttgaaactgaagttacttcgagtgcttaatcttggaggacttcattttatttgtcaaggatatagcccttggagtttaccagatgtgatcggaggtttagtccacttgaggtaccttgggatcgccgataccgttgtgaacaacttaccagatttcatctccaacttacggtttctacagacactagatgcatcaggcaactccttcgagcgaatgactgatctaagtaacctcacatcactaaggcatctcactggaagattcatcggagaattgcttataggcgacgcagtgaatcttcagaccttgaggtctatctcctcctatagctggagcaaactaaaacatgagttactcataaatcttcgggacttggagatctacgagttccacatattgaacgaccaaataaaagttcctttggacttagtttccttatcgaaactcaaaaatcttcgtgtcttgaagattgaagtagtgtccttcagcttattttccgaagaaacagttcgtttcgaactccttgtcaagctaacactgcattgcgacgtaagaagacttcccagagacatggatttgatctttcccagtcttgagtccctgacacttgtaacaaatctccaagaagacccaatgcctactctgcaaaaactacaacgtttagaaaatctagtcttgtattcttgtgtctacccgggagcgaaaatgttcatcaacgcacaaggttttggtcggctgaggaaacttaaagtgatcataaaaagattagatgagttggagattgaagaagaagccatgccatgtttgatgaagctaaatcttgacaataaagatggagctacaaagctaatgattcccgatcgaatgcgagcgtttgtttgagggtactacggtatctggaaaacaattgtggagcaacgaagttgatgattctagattgatttcgagtgtgttttttcgacgtataaacttgtttaattagcaaaaacagtgtgattaaaaaacaaaaagaaaaacaaaaaaaacagcgtgattttaaagaaagtttattcggccatagacttgggaacaatataattggatgtcattttgttatatggctatatatgtggttataaccatcaactataacaagagatataagaaaaggggtctccttcttcacatgtacaacaaattaatctaagcataaggctcaaagactatattagaccgtttagaaattgacccctatgatcgaagttatatactctccaaccagcaaaaagcattaaggctgcgaagaccaatgcgccaattgcggtacaataaagttgtaattcaggccaacgatagacaagaactccctattagagtccacaactaaacaagcccaagcccaatgtgatttccatgtaactagggttttagcaagttagattcatatatatagttacgtaatgagaactatgtgaggaacttttgagagttggaaacaactctccttctcttctttatgaaatatcaatcttaaatcattttgctattggtgacaagctaaagctctttcctttctttgttcgttacatttgaataaagctccatatgagctatcttattttcaatcctatatttctctttcaataagctcaatgagcacaattctcatttcttaaaaaatgtctacatggtatcagagccaaacggttcatttgggttttactagcttatagcttccgctcaaactatctagaagaaagctttcaccagattttcatgggtctccatctcacaagtttatagctttcgttccagaagatcctttaatcaagtctctaggcggcgaaatcaacacaaaatcccacaatagatttcagcagagcgaagtctcaacaattgaacaaagaaaggaaagagttttagcttgtcactaatagcaaaatgatttaagattgatatttcataaagaagagaaggagagttgtttccaactctcaaaagttcctcacatagttctcgttgcataactatatatatgaatctaactttgctaaaaccctagttacatggaaatcacattgggcttgggcttgtggactctaatacttcccccccccccgcccgaacacagcttaagaggagtagttatgaaccctgtcgaccatccccatggaggttgtgaagggagggctaagatggtacatatttcacaaaccgtatctgcatttagttgtttatcaccaaacaaaactcttatataactgataaactagtcaaaaagtatgtttacactaagattggagaaccatgcatgaagaatgcttaaaattgttgtataccgccaatccggccctttgatgcaataattgcaaccaaccaatattggagaaccatgcatgcgttttagcctcttttcaggaaatcttattatatttggagactagctacaagtatagcctcttgacattttagttttttttaaaatctaaatatcaaaacaaatcctaccaattggctaaaacgaccaactctcatgtgagccaaaacaaaacaaacagaatgaacacgcttttattggaatatataatgtcattttcttctttctattatatgtcacgttagcgtgtggaaatgttattattgcattaagacaaagtcgtagtatgcgtcacacgaggaacacgagagagttgttgtcacacgaggaacacgagagatagaatgagacgacaaaaaatgtagtttgcatcgcttaaattgaatattagcatcattagaaaaataaaattaacatcaattataattgatgtaaatgaattttacatcacttatataagtgactctaaattggtgacataaatattttgcattagttaaactaaatatttgtattattaattataattgatatgaatatacatcagttgttaaaaatgatgttattttctgcatcacgtaatataaatgtattatattagctacagttatgacaaatgaatgattagctacagttatatatttacatcagttggtcaatgtcccgtacacagctttctcaaaattgaatgatttattttgataataattcctacacgatggaaggtcatttgccttgaggaagttagtggaaaacaagttattggttaaagaaataaaatgaggaatgcgttaattcttataaaaaacataaaatacatttggtttgagagttattgatgtagcatgtgaccatgtgtcaagatttatttgctatgtaagtatgtgtcaacctttatctccacagctaagtagttgacttgctggcatttaataaaacacaatgttgaatagtcagtggcgtgtgtttctacaacacaatgtaaggctattgttgctttaaaaagtagacacttgactatataaaattgtctcctttgaaagattatggaattttagtaattttgtttttagcggaattaccggttataggggtgtcaaaatgggtaacccaactcaactcaactcataatcaaatgagtttaaaattaaatgagttatgggttgacccaacttatttaacaaaataagttgggtcaacccataactcatttaatttgatgggttgagttgttaaatgggttaacccatttaagtaataatttaattaattattattataaaaaaataataaataattatcattattaattcattatcatcaaacttaagatatttacagattccacttttcacaggtttacgtttttggtaccgaaaatcacggatttacgtttttggtgggaaaattataggtttttacgttttcggccggaaaatgatgggtttacgtttttgacggaaaaatcatgggtttacgttttggacgaaaaaataacggatttacgtttttggcgggaaaatctcgggtttacgtttttggcgggaaaatcacgggtttacgtttttggcgggaaaatcacgggtttacgtttttggcgggaaaatcacggggttacatttttggtgggaaaatcacggggttacatttttggcgggaaaatcacgggtttacgtttttggtgagaaaattacgggtttacgtttttggcgggaaaattacgggtttacgtttttggcgggaaaattatggatttacgtttttggcaagaaaatcacgggtttacgtttttggcgagaaaatcacgggtttatgttttttggtggaaaaattacgagtttattttttctcaattgcatcgcttgtatatttaagaattttggaaaaatattaattttattaaattggtttagatgtgtttgttaaacttaaattggcattggtttagagattttagttggtttaattcaaatttacaaaatttgatgggttaattgggtaaaccattgaaaccattaaccattacaacccaactcattttactcatcaaaccaattgactcatcaacccatttgacccatcaactcatttgagtaaaaaaatttaagggttcatgggttgagttgagttgagttgacccatgaattttgacccattttgacacccctaaccggtcattatataataatttttattatttaatatggtagtttattttattaaaaaaaaaattatatgaagatcttttacacaaaacttttatgtttttaatagagttatcgactatcacatcatcgatatacgaaaaagttatattgcagtgacttttaaaattttagtattaatctgcatttatttaagatatagattttttttacaaaaaaaaaggttacataaaaggttcttttacacaaaatcctaaatgtaaagtatcctttaattattttgtcatcaattctaaaaaaagatattattgtactaaattttaaaagagaaagacaacacatgtcataaaaatagaatgcaaatatcggtgtctgagaggtcgttttgaaaaaattttacttcattatataagattaaatacgttcataatactattatgggaggaaaaagttagaaacacagtgactttttcattggaatcagaagaaagatccaaagctcttgacatgccctattatctttggatttccttgtgtagagaggcacaacacaagcttcccagttcttgaaatcatttttgacaaactcttaagaaaccttctgaaccacttaaatacaatttcaacagaattataaggtcatattgaccataacaagccaattgctttaaaatgacagcatatgaaaaagaagaaccccatgatttgagagttattggtgattcatgtgttaaaaacttctctcccacgaaaatgatgtgtcaacctcatatttcctgctgatattcatgtgatttctcacgcaacacaacgtattaatcatagccgtgactagttggcatttaagaattatatcctttggaagatcttcgaatctacacgaaatgggattttaataattctacatatggatcacattcacctatatatatatagatatgctatgcattgagataaaacatgagatagggagagagtgtagtagagagaggggttaagaaatggagaaaagagtagagaagagaaggatagtgttggttccacttccattactaggacatttcactccgatgatgcaactcggccaagcccttatcttgaagggattctcaattatagttcctcagggagaattcaatcgagtaaactcttcgcagaagttccctggttttcaatttatcaccataccagattctgaactcgaggcaaatggaccagtcgggtctctaacacagctcaacaaaattatggaggcaagcttcaaggactgtataaggcagttgttgaaacaacaaggcaatgatattgcatgtatcatctacgacgagttcatgtatttttgtggagccgtagctgaggagttgaagcttcccaatttcatcttcagtactcaaactgctacacataaagtttgctgcaatgttttaagcaaacttaatgccaagaagtacttgatcgacatggaaggtatacaaaaactagcttattacccattatgcttactctccttatgttcaacataattttgttttgactttgcagagcatgacgtgcaaaacaaggtagtggaaaatatgcatccattaagatacaaagacttaccaactgcaacatttggagaactagaaccttttttggagctctgtagagatgtagtcaacaaaagaacagcctctgctgttatcatcaacaccgtgacctgtctagagagctcgtctctcacaaggctgcaacaagaactccaaattccggtgtatccattaggccctcttcacattacagattcatcgacaggatttactgtgctgcaagaggataggagctgcgttgaatggctgaacaagcagaaaccaaggtctgtcatatacataagtttaggaagcatggttctcatggaaaccaaggagatgttagagatggcttggggaatgttgaatagcaaccaacctttcttatgggtcatccgacctggatctgtctcaggctccgaggggatagagtcattgccagaggaagtcagtaagatggttttagagaaaggatacattgtgaaatgggcaccacaaatagaagtactaggacatccctcagtgggaggcttttggagccactgtggatggaactcaacactcgagagcattgtggaaggagttccaatgatttgcaggccttatcaaggcgagcagatgttaaatgcaatatatctagagagtgtatggagaatagggattcaggtaggaggtgaactggaaagaggagccgtcgagagagctgtgaagaggttgattgtggataaagaaggtgcaagcatgagggagagaacccttgttttaaaagagaagctcaaagcctctattagaggtggaggctcctcatgcaatgcattagatgagcttgtcaagcacttgaagacagagtgaagaattagaatgcaatgatttttttgttaaatggtttttttaaagagttaatgatgcatatttttcaaagtagatgattttctatgcgcaaataaaaaagttattggaaccagaggaaagatccaagcttttcaaattcaaggaacgtcattgttctaattcgtatttaacattcccaattatgtatagatcatcacaaaaattctatattgaccaaaatatgcgtttactctttcgaaaatgttagcttcttccttcgttgaaagttattgctttcaaaagatatatgaagaatacttaaaatggtatagcaaccctttgatgcaataattgaaaccaagattggagaaccatgcatttagccacttttgagaaaattttattatatttggagactagaaagtaaaacctcttagcatttttgttattattatctaaatctcaagacaaaacctacccaatggtgctcaaaaccaccaactcctatatctatctatatgagacaaaacaaaataaaacaagtttttcttggaattaatgtcatactctcagtaaatataaatgggattttaaccaaaaaaatactttttagtcaacagatttttaataataatttagatcacttatttagagttgttcagcaatgatgttatactaaccaataatcatggatgatgaagatgcaggtatgacttatgagtgataggtaaattttgtcaaagagaaattgaaagcctccgtaagaagtggagtctgagtgaaaacacggtgctaaactttgctaaagacagaataaatcaaatgaacttcatgtaacatataaaaacataagtaatagaccagctttgatttttatagatcaagcttgttcttgcaaaaattacaaaagtagatgctttgctatgcaaataaaaagctttcactttaattctcatacaaagagaaaatacgtaatggtttgagagttgttgatgtagcttgtgactttatcttcattaccacgtaattgatgtgtcaacctttatcttaacagctaaagtagttgacttgttggcatttaaaatctcttttagaagattatgttgaatagtcattggcgtgcgattattcttgctttgaaaaatgaacagttgactatagaaaatggtctcatttggaagattgtgggattttagttattacttggatcacgtataggattcagagacaagagaagagaaaagaggagagaaatggagaaaagggtagagaagagaaggattgtgttagttccggttgctgcacaaggacatgtaaccccaatgatgcagcttgggaaagcccttcaatcaaagggcttcttaattactgttgctcagagacagttcaatcaaataggctcatcattgcaacactttcctggttttgactttgtcaccataccagaaagcttacctcagtctgaatctaagaaactaggaccagctgagtatcttatgaatctcaacaaaacaagcgaggcaagcttcaaggagtgtataagtcagttatcgatgcaacaaggcaatgatatagcatgtatcatctatgacaagcttatgtacttctgtgaagcagcagctaaggagtttaagattcctagtgttatcttcagcactagcagtgctacaattcaagtttgctactgtgttttaagtgaactcagtgccgagaagttcttgatcgacatgaaaggttcccaaaatagcttaatgacccatttcgaaagcagtcggttcactcattacataatttttgttttcttactttgcagatcctgaaaagcaagataaggtgttggaaggtttgcatcctttaaggtacaaagacctaccaacttcaggatttggaccattagagccacttttggagatgtgtagggaagtagttaacaaaagaacagcttccgctgttatcatcaacacggcgagctgtctagagagcttgtctctgtcatggctgcaacaagaacttggaattccagtgtatccattaggccctcttcacattacagcttcatcgccgggacctagtttactgcaagaggacatgagctgcattgaatggctgaacaagcagaaaccaaggtcagtcatatacataagcttgggaaccaaagctcacatggagaccaaggagatgttagagatggcctggggattgttgaatagcaaccaacctttcttatgggtcatccgacctggctctgttgcaggcttcgagtggatagagttattaccagaggaagtcattaagatggtaacagaaagaggatacatagcgaaatgggcaccgcagatagaagtacttggacatcctgcagtgggaggattctggagccactgtggatggaactcaacactcgagagtattgtggaaggagtcccaatgatttgcaggcctttacaaggcgaacaaaagttaaatgcgatgtatatagaaagtgtttggaaaatagggattcaacttgaaggtgaagtggaaagggaaggtgtagagagagctgtgaagaggttgatcatagatgaagaaggtgcagccatgagggagagggctcttgatttaaaagagaagctcaatgcctcggtaagaagtggaggctcctcatacaacgcactggatgagcttgtcaagttcttgaatacagagtgaagatgcttaacttcatatattacaaaagaacttcgattataagaaaactccaatagaaatgtttacattctttggaatattaatttttgtcttccgttaaagttcataattatcaaaatttaaaacttgaacaatttttgtgttttatgaaaactagaaaacagtctttccacattaaattcacaatattctaatttgtgtgattcaaactagagatgaattttgtatggatatatgtctttgaatttgttgttttgaagaaggacacgaaattgaatacttcctctgtttcatattagttgtaatttaagatttttacacacatattaagaaatcataaaaatctcatttaatctacctcttttatataaaaacatcatttattataaccaattcaaccaataaaaaaatatataattaaatataattagttaaatggtattaaataaataaaaacccttaaactacatttatatagaaacagagggagtatcaatttttttttttaaatgtcgattcaaaatctttagtagactacaaaattgtttagtagactacaatttttagataactttgtctatcattttcccacttgtttagtataggagcatttttgtcagttcaaaccacattaattcaaaattatgacagtttggaaaaaaataaaaatttatggcattattggtaagtttattggtcaaagtggcaaccaaaacttttggtcaagtgacatttttggtaagttttttggtcaaagtggcaaccaaaaatattattcaacatgcaacccaaacttttgaagaaaatttattatatatggagactacaagtaaaaagcctcaagacaaaacctacccaacgtggttaaaaccaccaactcttatatgagacaaaagagaaacacacttttcttggagtgtttccactttattacttcattcagaaagactagttgtcacacaaggaacacgagagtcgagagagtaatatatatatagagagatagagcttaagcaatggagaaaatggaagagaagaaaaggatagtgttagttccggttccagcacaaagacatgtaactccaatgatgcagcttggcacagccctaaacatgaagggcttctctattactgttgttgaaggacagttcaataaagtaagctcatctcaaaactttcctggttttcaatttgtaaccataccagatacagagagcttgccagagtctgtgctcgagagactcggaccggtcgagtttttattcgagatcaacaaaaccagtgaggcaagcttcaaggactgtataaggcagtcgttgctgcaacaaggcaatgatatagcatgtatcatctacgacgagtatatgtacttctgtggagctgcagctaaggagttcaaccttcctagtgtaatattcagcacacaaagtgctactaatcaagtttcccgttgcgttttaagaaaactcagtgccgagaagttcttggtggacatggaaggtgcctaaaaccagcttaataacctatcttgaaaccattcgtttcactaatacgtcattttgttttggctttttagatcctgaagtgcaggaaacgttggtggaaaatttgcatccattaagatacaaagacctaccaacttcaggagttgggccactagatcgattatttgagctctgtagggaaatagtcaacaaaagaacagcttccgctgttatcatcaacacagtgagatgtctagagagctcgtctctgaaacgtctgcaacatgaactcgggattccggtgtacgcattaggccctcttcacattacagtttcagcagcttctagtttactggaagaggacaggagctgcgttgaatggttgaacaagcaaaaaccgaggtcagtcgtttacataagctt

SEQ ID NO: 491 - DNA, 87224 bp, Arabidopsis thaliana
aagcttgttcttctttaattttatatctaatattgattcagcatcactccttaacctgaactttatcccttggaggcgaagtcttttggccgacagtatcaacggaaatgtagactctgacgatgatacttctccggatttacccttagagtgttgaaatttcgaggatggtgttgtttctgattcacccatagatctcatgctaggtatgaaggtcttacggttgaggtcaagaagatgtttagccccgcggtctctgtgtttcgcccaatatgtatctggtttatctattgagaggttgaagaagctaaacgccatcctgtttagatcaccaggtgaccctattcctgatttatcaaatatagttcgaagaacaaagaaagggacctgattttccaagaggagaagatcactctgaatagatgccaaaatccaggggatcgtgaagattggatccttattcatatccaaatctatctttcttgacacgataagtaacaacatgagaatgaagcacccatccaaaatcatcatagacaccagttctgatttttctatcctaagttcctcagaataagaagctcttatcttgtgttgcaaagcacctactgccgcatacaagacgttttcgtccattcctttctttgttgccctgtctacgaaaagctccagaaaccgaaacttgtgctgctgaatcatttggaggtgattttctccgtaatgataaggaccaatggaaacaactttgggcttataggctttaggattcacctctgcgaggctatcagggattctgaagatgcagcaggacgccttaccagctgattccaaaagaatcagtggtttccccgatgactgtaagttgcgtttgatatgagatacaacacttctttcactacgttgtcgtaatggagaaagaggaccttcgtcgataatactaatagctatatcggaaagtgatgacgttgatctcgtctcatcctccataattcaaccccacttggatcctgttttcctggattcagatcatctatatttgattatcaaatttcaaattcaattcaaattcaataaaagagtttggttggagaaccgttgatgaaatcttaccaagggcgggagtagttgtaccgtgcgttctgcgctcttatcttcattcctgctgtagtatctttaagtcttttgtttacgttttttttgcttttttctttttcagaagtcttttgtttttgttttattcttgactcttgcgaggaaggtaattataatttgtaagcgactagtcagtctcgtcggcccaccactggtccattcaagtggggatcaaatccattcacgccagagaagacgcatttttggtagaattgtcaaaatatgtaaaccaacacaatacactaatgttgctgtcaaagaagaaaacaactagattttaacccgcggtacaccgcggaaacaatttattttttaaagttaatatacataaaagtttgcaaattgtatctatctataaaatatttttattttgtagtttacaactgttattaagtaacatcctgccaaacccgtcccgcccacccgtcccgtaaaaaaatcatttattttattaatgttaatcttatttatgatatgtttatgaattattgtctaaatattttgtaattttgtagtaattaaacgttatcaaatatctctgcggtttgatgattataatcgaattgttatagtcatggagaaaatcaatatcaaaaatgataattttgaagtaattaaatgatagtaaatattttggaagttttattttaataactaatgtggagagatttagggaagattgttaaatgtcaaatatttatttcgaagatgttttttttaattatcaaaaacaaacattaaaattcagtggcagtcattgtaaataagtcccaactacaggatttatttcacaaaataactgcaaaaatgtatatatagatgtcaaaaaaaaaacaagggagatttgcaaaactacacttattctaataaccttttgtaaaagtgtctttttctgaaggccatttttaaaactacctcttctaatatgccaaatgactgtcttaccctctgaatgattaggtttcacgttggtttcctctccgattttcctcttcttcattttggcacaaacttcttcgttttcctctttgattttcctctccgatttcactcaaaatcgccggcgaatttcctctccgatttcactcaaaatcaccgacgaattccctctccgatttcactcaaaatcgccaacgaatttcctctccgatttcactcaaaatcgccgacgaattttttttctgagaaaccccaaaatcgccgacaaatttcctctccgataaacctgttcttcgctgaaggattcagatcatttctctacgacgcaaacaatccccagagatatcgatagatccgacggtaaccgtttttataatcgattttataatcgattttatagtcgattttatagtcaattttatagtagatctgacgctgtttcataacatgttttgcagatggattcagagagtgaaatccttacattgcctgaacaaatctacagagaaggtgaggaatctattgcactgggaaccgttcaacaatactcggattggaatttagttagtaaagtagaggaagctttaggcgagtgtttatttcagaagattagaagttcgtttcttggtcctctagttgaattgggaccaaaaatgaaggctaagaagggaatcagattttctggaaaaatctttcactatctcatgcagcagagagtgaaaacaaaaggatcaactctttggtttagagttgattctcaacctatccgtttctccttgagagagttctatctcacaacaggtaataaagttttacaatcgtttttaaagcttaattaactgtcgtagaatgatttacaaggcatttgcataactgtttgcgtagtttacaatcgtttttaaaacataagtaagtgtcatagataatttacaagggattttaaaagcttttaaaaggggtttacttcattaacaatcgtttaagaagcataagttagtggcagataatgatttacaagggattttaaaaagggtatgcatggtttacaaccgtttttaggcataagtaactagcatagaataatttacaagggattttaaaagcttaaagaagtgttaaacacgtttacaagggattttaaaagcataagtaagtgtcttaaaacgatttacaagggattttagaagtgtttgcatagtttacaatcgattttaaaaacataagtaagtggcatagaatatttacaagggattttaaaaccttttctaagggttaaacatgattagcaatcgttttttaagcataagtaagttgaatagaatgatttacaagagattttaaaagcttttagaagggttaaacatgatttacaatcgtttttaaagcataagtaagtgccatataatgatttacaagggattttaaaagtgtctgcatggtttacaatcgtttttaaaaccataagttaatggcattgaatgatttataagggattttaaaagcttttaaaagcttttaaaagtgttaaacatgatttacaatcgtttttaaagtatttactataaaacctgtaataatagtctctacactgtcttttgttcatacaggaattcaatgtgaacctgttcatagggaacttcgacgaaaggggaaagatcctgtaaaagaaccatacttttgggctaataaagaatcctatactcttggtgatctcgaagatcgattgtttttaaaacctaaggaaggtgaacctgctgttgaagatgaagaaaagttgtgtcttgctgcagtagtgttgactgaaggaattcttttgacaccatatggaaaagagaagatacctttgccaagattgcagcatgcttctgattttgagatgtacacagcccaaccgtggggtaaagaagcattcagtgttctatcaaattcaattctgagaatggacgagaaaacttgggcaaaagagaaatatgatttgagaggatttggactagcgctaacaatatgggtgttgagcgcagttccagcatttggtgcagcatatggagttaaagataaggaattccaatctgaatatccattgatattgaagtggaaaagcactactactccagagtttttcaagatcgtaaaccttgtaaatgatgtttctgaggtaagcttttgtctatttacagaattctttaaatggttttgagatttgaagttctgctttctcaagatttgtaatgttattgtaacttcgcagattgaggtgaatacaattattggaaacccagaagacttcaagtctttagttcctgatttccacacagacgacgtagaattccaacaggttttggaacttgttaagatgggctacagattgaagaaaactgaatggaatacaagatgcgttgatgtttgtgttgcccttgaagaagtaggtcaaaacaaaatcaataacaaaatatctgatagcgagaagcttgacaggattttgacaatccttgaagatcttaacaagagagtcgagctgattgagaggattttggacattagaatggaggaaaagaataatcagagatctgaggaagatgaagaaagaaaacaagaagatgaaggagtagaaagacaaccagaggtaattgtaaatgtttctttaaaagctatttgaaaggaaatgttttacaatgtattttaaaggttaaatacgtagtaaacctttacaatgtactcttttttttcgcaggctgaagaagaaggaggactagaaagaaaagcagaggtaattgaaaatctttacaagctattttatagtctactaattatgttttaccatcacgttgggtgttttgattgacttattgtttttattttgttacagaatgacaatgaatcatttgaagattcaatccgagagccaaacacacagtatgggagctatccgggtgatgatgaaaacatccaacgtgatgttggtgatgaattagttgaagaatcatcaaaagtacagtaatttatatctctaaaagtcttacaaaaatgattagtatccttttttataattttacattctgttatcttttcaaggatatgtctcctactccacgatcctctacactaaatttcaatattttgtctgaagaaagtctggatgttcaaaaggataagaagagagttagcagaggaagaaatgaggttagcatttaaaaaaatttgtattatctaaccaagtgtttataatatttttttcaaatctttaaaagtttatctttcatgcaacttcagaacaagagagttaaaccaagtgttcatgctgaggataattttaaaacaagaaaacaggttagtatttgcaacagtactgtttttaaaaattgtcaattgtcttgttatgatatttacaagggattttaaaaatacttttaattggtgttttttactattctagatgccgagaaagaggcagaaacaagttgatagtgctgatgttgatattccaacaaggaaagaggttagtatctaatttattatgattttgaaaattttgtttacaaggtattttaaacatctattttttttattatttttgataggcacaaagtaagaaaaggaaaattattggcaatgatggtgataacgctgataatgatggcgacaatgatgattttcagcccgctccgcaaagaaagagtaagcggggtacggttccttccattcatacccaagcacctttcacagctgagaagaagaagcatccaattttgcatccatttgcgaaagttgatgccacaagacttgagaaattggctgaatggaagaagtcaaggaaaaacaagtgagttttgttagtaagatagtgagttttttttaataatggaagaagcatcattgttgactgttttgttgttgtaggccactatcaatcgcgggaaataatgtagatacaaagtggtttacaaccctagagacgccagggaaagcaatcacagcaacggtatgtctaaaaatccttgtaaaattggtaacccatgaattacatatagtttttaaagcatcattaagttatttacaaaagtgattttaaaaagggttacgtggtttataaacaattttaaaagattagaaagtggtaaagaatgatttacaaggtattttaaaaaggatttacatgacttgcaatcgtttttaacggattagaaagtggtaagaattgatttacaaggaattttaaaagctattaaaaagggtttaattgattaacaatcgttttagaagcagaacttagtggcatagaatgatttataagggattttaaaagcttttaaaagtatttaacttgatttacaatcgttaaaaagcataagtatgtggcgtagaatgatttacaaggtattttaaaaagggtttacattttttacaatcgtttttaaaggggttttctaatatgataatttttatttttgttgtgtttagcatgttgatgcagctttggagttgatgaaaacgaggaaggaaagcaatccagaattattcaaaaacaaatcagttgtatttgttggatcgtctttcttaaatgtgattgatgagtcatacatggagtttttggataacaaagagggatttcagtttcagtctgaagaaatcagtaagctgataatagaggaagaaaccaagtgcatattggctcatttctgtatcaaaggaaaatgctgggttgccttgctcatccacttggaacagaagacagtttgtatatgggaatgtgcagcttcttatttaacagaagaagtcaagaaaaaatatgttgctgcctactctatagctatgccatacattgttcggaacatcctcaaaaaagaagacatggatgtctctccatttagcatcaaagtcctgaccacttttcctcaggtaacttctttaaatatatcatagtcttagaaatgaatattccgtaagtcctgacttctataacttctttgcttaagtaattcttttggtttttggttgtaggctcctagaaatgaagagtctggtatctatatgctgaagtttatggaatgctactcaatgtataccagccattcaaaccttgaagggaacataattcaaaacgttaggaataaattggctgctgacatcttcaccgaattagggtcagtcactttgtaaaagtagtagacttctaatcaaaaagtagtggagtataagatagatttatcagcttttgtttcttatttcataaaactttgtcatttgaatattttatgaacatctgtatggaacaagatttatgaagtttatttagttcaactccagttttacaaaattactgtataatggttgtttgggttaacaggtgctttgatttgaatggaaaaagactttaaacatgcttttaaacagggtttttaaacgatttacaagctgctttataaggaatttgatagtgttgaaaaagctgcaattgcggttattatgaaaaaaaattacaatcgtttttaaaatgatttacaatcgtttttaaaaaagatttacaatcgtttttaaaagagatttacaaacgatttataagctgttttaaaagcgttttaaaagtgttgaaaaagctgcagtaactgttattatgaaaagctttacaaccgtttttaaaatgatttacaaacgtttttaaatgagaatttcaaccgttgaaaaagttacagtaatgttaaatactgtatctgttactaattgggcctaggcctgttatttagaaaaacaaactgttttagtttaaaaaaaactaaaagcccaaaaaacactaaagccctaaaattcagtataacctaaaaacaaattaaacagggattggctgctgacatcttcaccgaattagggtcagtcactttgaaaagatttacaaccgtttttaaaatgatttacaaccgtttttaaattgatttacaaccgtttttaaaatgatttacaaccgtttttaaaagagaatatcaaccgttaaaaaagttacagtaatgttaaacactgtatctgttactaatttggcctaggcctattatttagaaaaaagaaactgttttagtaaaaaaacactaaaagcccaaaaaacactaaagcccaaaaattcactataacccaaaaacaaaaaaggaagggaaccgtgaaaagacaacaaaaaagtaacaaaaaaaaaaaaaaaagaatacaaactgtcgtcttcgtcttcttcctttcaacaatctgaaaaaaatctgattatccagcaaaaaggaagcaattgaaggtaactaatttacgaaactgaagtttaacatttgggtttgttcgatttttgccgaatctcttttttgttctagcatttctaggtttttcggttgaaaacgaaacaagtaaaataaattgatatttgggattttgaaggagtgttgaaaattgttatataaatttgacagatttatgttttaaagtttgatatttgggtttcaaaaaccttcaaagaagatttcaaatgccgattaacttctctgttgtagcaatttcaaagttttttcgttttgaaactttaacagtaaatagattgatgtttgggtttgtattttaatttatagatcctcacttaatttatgggttaccagttgattggagttggtttggaaaagggttttttgtttctattttcagcggttgtgttctttgaaaaggattaaaattttgtctttggaatggtttcaaaacggtctttaaaaaggattatggggtaatgactgtgttttacaagggtttttaaagtcttaaaacgacttgtaatgactttaaaaaatggttttacaagggtttttaaagttttttaaacgacttgtaatgactatgtttatgtttcgaaaacaacaaatgcataatagatttacaaaaatggtttttaaaaccattaaaaaaaactgtgttaatttaatgactgtgttaatgtattaaatcaggttttgagaaatatgagtacaaagaaacttttcttccctaaaagactgttccaaccaggcagcgaagtagataatattacaagggtatcaaagcattcatccttcaaaattgtctcgactgtcaggaaagctttagagccgatagagttcaacacattaatgggcacattcttgggtcctatagtggaattcgctgaaatggacttggcattttcaagccatatcgttcatcatttactccagagaagaatactaaccaacaatgacaaattgtggtttgtatttgctgatcaacctatgcgattctccctgagagagtttatcataacaacaggacttccaatggatgatgcatcaggaagcagtccaaatgtgaagagaaagaagaaagaaaagtggtggataaaagataatcagactttgaagggaaagcagaaaaaagatgtgtggattaacaaggaaatgacttttttagatcttacatatgttttggaaaagcgttccaaaaaaatgcagccagaggagagactgagattggcgggttcgttactagtggaaggcatattgctagctcgaaatccgactaccatgctgtcaattgagaatctgaagagacctactgatttcgaaaagttctgtaagtatccatgggcgcagattgtgtactcatatttggtaactgaagagaagagaatcggtaatgactatttgttaaggaaacaatatggtctatttggatttgttcaatcaattcagatatgggcattatcatcgattcagaagttgggagaaaagtttggcactagagatgaatcatctagtggaaatattccattaattctctaatggagatcaacatcgtctccaagtgcaaaagctataacaatgatagcagatggtgacaaggtacattttcttagttgtggctttttttatgttttaaacactgtttataaataaagagtatgttttacaatagtttttacaatcaagttttaaagatttacaaagggttaaaagcaatttaaactatttacaacgaaattttaaaaggttaattaagaattgtgcattatttttacacagtttggaattttatttatttttacaggttgaagtgacaccaatagttggtgttcataatcatgaatacgagcacttggtttcacagaagaatcctgaagacaaggatctgttggatgtttttgatcttgtgatcaaaggatatagaatgagcaagaaggattggtgtcagggatggattcaagtggaacaaggacatcaaggaagaatttatcatgtcttgaaacctgcaattgaaacagttgtgcatcaaagcagaaaaagaaaatcaatgtcctttggtgagaaggtaaaactggtatatgaaaattgtgaggttcttaagaagaaagttggaaggctggagggctatttaggcatccaaagagttcctgccagttatactagagaagaacaaaaagaagaggacgaaaaaaaggagcaggaagaagaaaagcaagaggaagaaggaaaagaagaggaattagaaaaggtatgtgtttttacaagggattttaaaagcttatagatcgtgttttaaagatttttagccgtttttaaaagataggcagtgttagatatgtatttacaagggattttaaagacttcttaatggggttttaaaagattgaaattcgtttttaaaggataggcagtgttcgataagattttacaacggattttaaaagctttttaaaagtgatttacatgagtaacttgtagttataaaacttgtaattttatatacaggttgaatacagaggcgacgaagggacagaaaaacaagaaatccccaaacaaggcgatgaagaaatggaaggggaagaagaaaagcaagaggaagaaggaaaagaagagtaattagaaaaggtatgtgtttttacaagggattttaaaagcttataaatcgtgttttaaagatttttagccgttttaaaaagataagcagtgttagatgtgtttttacaagggattttaaagacttcttaatggggttttaaaagattgaaattcgtttttaaaggataggcagtgttcgataagattttacaacggattttaaaagctttttaaaagtgatttacatggtaacttgtagttataaaacttgtaattttatatacaggttgaatacagaggcgacgaaaggacagaaaaacaagaaatccccaaacaaggcgatgaagaaatggaaggggaagaagaaaagcaaaaggaagaaggaaaagaagaggaagaagaaaaggtatgtgtttttacaagggattttaaaagcttataaatcgtgttttaaagatttttagccgttttaaaaagataagcagtgttagatgtgtttttacaagggattttaaagacttcctaatggggttttaaaagattgaaattcgtttttaaaggataggcagtgttcgataagattttacaacggattttaaaagctttttaaaagtgatttacatgagtaacttgtagttataaaacttgtaattttatatacaggttgaatacagaggcgacgaagggacagaaaaacaagaaatccccaaacaaggcgatgaagaaatggaaggggaagaagaaaagcaagaggaagaaggaaaagaagaggaagaagaaaaggtatgtgtttttacaagggattttaaaagcttataaatcgtgttttaaagatttttagccgttttaaaaagataagcagtgttagatatgtatttataaggggttttaaagacttcttaatggggttttaaaagattgaaattcgtttttaaagggtaggcagtgttcgataagattttacaacggattttaaaagcttttttaaagtgatttacatgactaataactgtgtcctggcttgtatttgggaacttgtaattatttatacaggttgaatacagagatcatcattctacttgcaatgttgaagaaacagaaaaacaagagaatcccaaacaaggcgatgaagaaatggaaagagaagaaggaaaagaagaaaacgtagaagaacatgatgaacatgatgagactgaagatcaaaaagcatatgtaattttgtcagatgatgaagataatgggactgcacccacagagaaagaatcacaacctcaaaaagaagaaacaacagaggtctgcattccttaattgtttaaaaagacatgataaaattgtcaaaaaataaaaatttgttttgatgttttggtttacaggttccaaaagaagaaaacgtagaagaacatgatgaacatgatgagactgaagatcaagaagcatatgtaattttgttagatgatgaagataatgggactgcacccacagagaaagaatcacaacctcaaaaagaagaaataacagaggtctgcattccttaattgtttaaaaagacatgataaaattgtcaaaaaataaaaatttgttttgatgtttttgtttacaggttccaagagagaccaagaaagatgatgaagatgttaatcaaacaccactctctacgcaagaagaagaaatcacccagggacagagcagtcgtaagttctttttacattcacagatgatttgccttgataaacaacttctaaatatttttgtttttgtttttgtatcagttcaaactcctttgacgccggtcatgttgagtaaggaagtaatggaagaaattgacctaaaagttaaaaaatgggcgaaaaacaaattaataagagatctactatcgtcacttgaagaagtaagttaaattacatcattgttttgctgcaaaagattttaattttaatcattttgaaatttttacatttcagattctttggcccgacagtaaatggcaaaaagtcaaaatttgggatatgtggaacgagaagaaatacaaattagcattaaagaaagcaacgttactcattcatcctaacaaactgcctcgagctcatccagaagtgaaatacctagctgaacaaatctgcaagataataatggttagtgttaaactcttcttttgtataacgatatatctttaaaaacttgaatattattgttatgcaaaaaataacttacaggttgaattttatttgcaggtagagaaggacagagctactaaggcaaaaatggatttagttctttagactgacttatttcaaacatgtttattttacttttgttatttggaatctatgattgtacttgtattttaattatgactgtcaaatctaatcaaaatgctttactattgtcaactgtttatggttttataagaattgtcatgatttacaagtaattttaaaggcagaaacagcttacatggtttgctatcggtttttaaggataataaagtggtaaaccatgatttacaagggattttaaaagcttttaaaaggggtttacttgattaacattcgtttaagaataataagttaatgtcagaaaatgatttataagggattttaaaagcttgtaaaagtgtttaacttgatttacaatcgtttaaagtatatgtaagtggcataacgaaagatttacaaggtattttaaaaggatttaaacagacgttttaaacaggattttacaagagattttaaaagataaaatattggaataaccttcaaaattacttgtaaaagtttgatagtaattttaacaaacgagagtaatgacacgacacaatgaagaaaatattaaaaacccaacaatattcaattctttggagataaagatatatctaaattgcagcaacacaagttgatttgttgtgacccgactgaccacacctactgcatttgtgtaattttggttttggctgagaccgtccatgctcccaaacagaaggtatcctctttttcttccgtttgccagtaggtacacgagtagaaggtgggagacaaataacttcactaatagtttctggaatctcccaatattccatatcaccatttgggtgaatgctctctgaatatgcttgacgccacctgtaaattacagcgatgtaaactgagattaaaaccacataaacacagataaaaccataaaaagagatattaaaacattttaaaacgcctgtaaagttgtgaagaatagagataaaacctgtaagtagaatgaaactcatcaacaaacatgttttcgttcagattgatatgtttagcagaagcaattccatgtgcgcaaggaaatttatcaatatcaaacatacaacatgtgcaagtccttttgtccagattaaccaaatgcgttttggtatctccttttacctcaaactcttcttgattaacttgacaaacctcaagccatcgtgttgaagtatcatatgacgctttcattttcttccctacatttatagtaacagcagacggatgttgactactctcttcacgtcgttcattaaaccatcttgtcataatagatctaattgactcaaataggcaaacaaccggatactcgcggttctgtttcaacaaggcattaacagattcagctagattagatgtcatgatgttgtaccgatttgaaggagaataagctcgagaccatttcctaacatctacctcgcaaagatattgtgctaactttttatcactattagtgatttcccagaacaaagaatcaaattctgtcttcgtgtaaattctagaagccgcatagtaaactggaataagtgaagaacctctgaaatgggtttccaagtttttttgcaaatgaaaagtgcaaagtccatgatgagcaagtggataattccctgaaagtctgcttgcaatagaagcagctcggtcagacacaaaaactaaatcattctcatcagggattatattcagcaaacacttcaaaaaccagtcccatgacgcgtcattttcagagtcaactattgcaaaagcaataggatacaaattaaaattcccatcctgagctgaggcaccaagcaaagtccctttaaactttgatgtcagatgggcaccatcaatagatatgacttttctcatcaacttataacctctaattgatgcaccaaaagccagaaacgcatacttaaacttattagcagaatcttttttgaaaaaagtgatagaacctggattcgtcacttgtaccctgtggaaccacctcggtaaaacctcaaaactatcatcaggtaaacccctcgcaagttctgctgcatgtttttgaactctccaagccttcgaataattgattccaactccatgatcttttctaaatatttctatcagctgtttaggtctgaggggaagctttcctccttcaaaatggttacttatcaatcttcctaatgtccttgcagatgcttgacgatgactaacattccttaatgaagagtcacaactgtgatgactaacatacttccgaataacataactctcggatccaccagccctagttgcacgtagtctccaactacagttttcatcaatacaatgaagaacatacctcgtgagatctgatttcaccgtatgaaacttaaagctgtgcttcactgcaaacttccgcaacgtgaataccatttcatctttgtctttgaaaatttttccaataaacaaagaatcagcatcacttagaccagttgaaaacgcagaactagaatactgttgatcaagaatactagatgtttcagatacacacgcctcaataatcctagaggttaacctcggctgccaaaataaaaagcttacctcaaacatcaatctatcttaaataatgattttacaaggatttttaaaaggggtttaaaaacgttaataatgattttacaagattttttaaaaggattattacctgagtagtagatgcagaatgagaagcaaaaggatttgaagtcgtctcagcctgtaataaactcactcactgacttaataatgattttacaaggatttttaaaaggggtttaaaaacgttaataatgattttacaaggatttttaaaacgattagtacctgagcattagggacagaatgagaaacaaaaggatttgaagtagtctcagcctgtaataagcacaatcactgacttaataatgattttacaaggattttttaaattataacacaagaaggttattgaaaaacctgctcaactgtcacagaaatttgctctacaatcaaacataactgaagcaatcctccactctgtgagaatttgtgcataaaagttgcaagctgtctatcgttcctaatataaagaggatgagattgtatggttgtagacgtggagactaacttgtaactaagcttcaaagaattggttgaactatctatttgaaaatcctctacaagaatatcaaccaacgcgtgataggtaatgtgctcatcaatgagcactaaagaagctcccaaatcaatgtctaattcaaattcccaagtcatattgtttgtcaacttccacaagccacaaacagaatacaattctagcattataacctgataagataaataacaacaaaatcaacacccacaaaaacactgtcactacaaagagaagcaaggtttacaaatcgttttaaagcgtaagtaagtagaatagaataatttacaaggattttaaaagctttgaaaagtggttaacatggtttacaaatcgttttaaagcgtaagtaagtagcatagaataatttacaagagattttaaatgctttgaaaagtggttaacatggtttacaaatcgttttaaagcatatgcaaaagaggtaaacactaaatcagaaccaaaatctattacgaaatagtataacgaattcacataagcaaatctatcacgaaacagtataacgaattcaaaaggattttagaacagtataacgaatgtacaaggattttagaaacaaattcaatcatcaaatctcaaacaaaattcaaattcgaagctgaagcaaatgtcaaactgtcgattgaatcaggattcaaataacgagttcacataatcaacaacaaaaatcgaataaaccaattcgaaaacgaagatttaagctaacattataaaatcaaacctgggaaacgcaagagattcgacggcgacacacagctctacttacgacggcgaagatgggttttcacggcgagtaaactcattatttccgacggcatgggattcaacggcattcacaatttccgatggaggaagaagagagagaatgaagaaatgaattaggtctgtggatagctcattaagggtaatttggggagaaaagtattagaaagggtagaaatgaaaatggggaaaaaaagggtagagttgcaaaagggcattgaaaaaagggcattagagtgaattattcaaaaaacaatacactattctcactatcttaatggaaaaatatcgaaaaaactctaaactttcaaattttggatgaaaaacttttaattaacttctcaataattaaaaattaaacgtaactaaataataatagatttaattgcccgttaaaaaccaaaatgacgtcgttttaaagctaaaaattatacgtaaaaaaaagttatccaccatgtactcgaatcaaaaacatgggaaatccttaacaggcttttgaaccatgtagtcacttaaatctgttatcattttgttaacaaaaattgaatgttatttcttaaacgatctgattaacaaaacttaaattttttattgaaaagtcaattaaaacttcataattaaaataacatttttaaagtttaaattttttcgtctgacatttagtttttttttggacatgtttccctatcttgattcaatacctgaaaacgcaaatcttttaataaattaaaaataaaactatatttaaacgataaacatgaactacattatcttttcctaactttattccgtgtcaactatgtcgccatctgaatcttgaattacttgcactatatgaacaaccttttgacacgtgggcttaaggagagaagaaataaaagtttgaaacttgagagtagttccaaatatttttcatttgacaaaagttttaaaaaaaaatgaataattgctaagaatgatctttcaatacgggaaaaatgtcaaaacaaatcacgaactttcaaatttgggacgatttaattttgaatttcaaaaaaaacaaataaatcgtaattttcttgttgactttcgaaataaataacaaagtttttgttgacttgtcatttgagtcatgtcgttaagtaggttaacaaaaaaaatttacggcgttaatgtctcctttatctcctctgttagaacaaaaaaacgttgtttattgcagttcgttttgtctgttgacacaaatttaaaccctaaatccccaaatcgattttattatctgcgattttgaagtcaatgtgggtctgtgattttgagataataaaatcgatttggagatttagggtttatatttgtttcaagagacaaaacaacgttgttttgtctcttcaataaacgacgttgttttgttctaacagatcaaataaacattaacaccgtaaaaaaattctcttaacctatttaacgatatgactcaaatggcaagtcaacaaaaactttgtcatttatttcgaaagttaacaaaaacttcacaatttatttgtcgaagtttaagattaaatcgtcccaaatttgaaagttcgtaattttttgacatttttctcttttcaatactatctttttcaattatgttattttctctttctcatttttatttaccctctcttttattttttaatgaccatttacccatattttgaaaatattttaggttaacaaaataaaatattgatttgtcccgtctaaaatatttccgtcaaaaatttccaacaaaatttatttttgagaaaaaatactctcgatatatttttttagcgggaactagatttacaaagatttttgaatgatttacaagagttttaaaaccctattaaaactcttgtaaattttgtcataaccttttgtaaatattcacaagagtttttcaatggttcaaaaagagttacaaatgtattcaaatttttacaaatttttttaagagtaaaaaaatggtttaaagattttataagagttttaaaaagatttacaaaagttcctaaaatccttgtaaatcctttaaaaactcttgtaaatattttaaaattattgtaaaagattttaatatgatttacaattaaagagattttaaaatatttacatatgtatttaaagattttataaaaatttaaaaaaaaattaaaataatttataaagattttaagaagttttaaaatgatttataaagccttttaaacactttacaaagcttttaaaaaattttataaggttttttaagagtttttaaaaatttctttacaattttacaaagatttttaaatatattttttttgctggaaaatattttattacgggaaaaaggttttggtgggaaaaacttttttgaccgggaaaaaaataattttgttgtctgtcattttaaggaaggatactgttctctgtcttttactttggggttcaacttaaaaaactatttttcattcgtctgatgcaagcccatatcgagattgtttcaaaacatagagattcttttttgggccatacttctttaggttcagccgttttcagggtaacaacttctgatgaaactgaaaccaagtaaattacccattcttcattttgtgggcttaatagacatatatttgtaaagtgaggatccaatttcgaaaattttaggtatcctattttccacagcgtgatagcgacaatgctaggccacatgtcattatttccttggtccatcttctgaccattaatacaaattaacaaaattacaaaacattaaattcaaaaatctcagcaaatatagaggatttacgttttagtgtatccgattatggttcgacagagagcatagaaacaaaagtttcctccacttgttgtttcaacaaaacaaaatcctcccctttcatatgttagttacgaggcgatgggaatcgcatccggcgaactcgccggacctcatcttacagttttttgggaatgaattccacggctacggtgacgatatgcctgagacattgcggaggttgacggagttgctgggttatgagaaggaagaagacggcgccggaatgaatgcagccaagaaaatcgcggcggaattgaatcgccgaaaagatgatataccggctttcagacgcttgcggtgtctcgagcttgatcagttgaacgagtttcttttttctacgaagctcaatcccccgatcggtgaccaggtgaatctcttttagttttgaccggaattgacttaaaaagtccttaggttcttctagttgattctgctatatctcgagtcttggctattcatttcaaccctatagcaaattcaattttggcttctctacgtgatgtggtttcctgcttgtaattgttagaaactgaagcctcttgttacaaagaacacaacaagcgtttcacttgttgttgtgtttaaacagaggaatttgattattagaatcagaatcgagaagaacaaagaagagtaacaggaaactgacttttattgaatggggaacttgttcattacatcacgatacaaaaagtttaaatagaaaacacagcgacagaacaagtgaagagtcgtgtctctttctctctaagataaacgacacaacctaatttaaaagtcactactctaacaaacaccttttaatacaacataattataacatatagaccaaactcaattataaactaacagtaataattataacagaagtcgtgtttctttaggttcatcatgacatgcatgctccgctgtcgcattacttcattcacaccagcctcaattcctacttcaccgggaatgtctttgggaaatacagcattttgcccatcattgaagcacttgaacagggtgtgagggtggttgaactagatctgtggccggatggtagaggcagcatctgcgttaggcctagctggtatgaagccctgtttgtgtccgattcttgttttgcttttcctctgaaaactattaattgtttcattatgaatttcataggaactttgagaagcctctgaaattgcaagagtgtttggattctattaaagaacatgcctttaccaaatgtacatatcccttgataattacgttcaaggacggcttgaaaccggaacttcaatccaaagctactcaggtttagaatcttctatcatccttgagtattctaaattttctgatcacagataaatgtgatggtattgacataggtatggacatgttgtatatgtagatgatacaacagacatttaatcatatggtatatcaccatgatcctcatagtttggaggtttttccttcgccacaacaactgcgaaataagatactaatatcaagaagacccccaaaagagttgttatatgctaatgatgatgatggaaaggttggcgtacggaatggggttgagataagacaacacccggcagatccaaattaccagagtttagtttccttccatgtagtggagccaagaggcatgctacaaaacgtattaacaggcaaggctaacaaaatccaacgaccaggatggtacgaaacagatattataaggtacgtgttgcgaaataagtgttattttatatattttccacagggtgagatcacaagtattgaaaagctaagtgattaagaaatacttgacaatcaacagcttcacccaaaagagattcttgcggacacgtccacaacggaaattgttgatctatgccccctataaaccccaaagagcgtggatgcacggtgctcaattgattgcactaagcaggaaggtatgcctcttaacttttatttctctctgttttttttctggtttctcttgctcatgtagtagttccacaagcgtgtacacactatgtggaatcaaccatgtatacccttagtttttttttgggcttacctatcggactctatgtcatgagtacaacatgttttaccacataactacaggaggagaaagaaaaactttggttgatgcaagggatgtttagagcaaatggagggtgcggttatgtcaagaagccggatttccttttgaatgctggtcctagtggagttttctatccaacagtgaatccggtggttgtgaagatattgaaggtttttcatactacaccaagcttcgattttctcacttaagatgggtgataacattatagtttgcaggtcaaaatctacatgggagatggatggattgtggacttcaagaagcgcataggtcgactgtctaagccggacttatacgttagggtacaaaaatctaatcaggagaagatatatataactttattgggtctggaaatgtgtttgattttagttctttcgttgcatatgaacgcagattagtattgccggtgtaccccatgatgagaacattatgaaaacaacggtgaaaaacaacgaatggacacctacatggggagaagaattcacattccctttgacctatcctgaccttgctttgattagttttgaagtttatgactacgaagtatcgactgcagatgcattttgtggtcagacttgtctaccggtttctgaactaatagaaggaattcgtgctgttccgctctatgatgaaagaggtaaggcgtgcagctcgacaatgctgctcacacgttttaagtggtcttagcctacaagtttctttctcattaccaagtggctcttggtctagtggtgtttcttaaaacctttcaaagttacgctttctaggacccctagttcaagttccatttggaagggggaaagagtttaggcaagcttagattgtgatacggaaataaggtcttggtccagaactagtttgcattgccattttacttttggaacgaaaacaaattattcgccattcaagtttctttcacttttattgttgaatttcttttactatcctttcactttaaaaactgtttttcattcttctgcaaattcttctcgatagattggttcaaaacttatggattttttttttttgggccatacttctttaggttcagccgttctgggtaacaacttttgatgaaactgaaacttagtgatgaagtaaaatagtgaaacttagttatgcatatatttgcaaaattaaaaataaaagcggatctagttctgaatactccatgtatcctatttttcattgcatagcttatttggtgtgttggttttggaaattttcctagtgcaaaattgcaaaatgtggcgacatgatgttgacatcagaaccaaagaagacccagagttgaccagactagccggttcaaacatcaaccaaaccaaaccggaccaaaaaggagaattttggtgcaaaccaagttccgatcaagcaactgacctaggattggatatttacaaataaatccatcataagaagagtaatgattcagctgtaatcataaatcaccatgtcgaactgaatttggtccgcgatgacccacccaaagcacacaatactcaaatacaccaactcaatgaagagttttccagacctaaattgaatattcaccagaaagttacatatttcaagacatggcgatacataaacaataacttctgaaccaatcaactagagagccgagaagacccatccggatcaagtcaactacaagatcatcgacccaaagtcacattttctcaacctatctttgatatttaccaatattatgcacattttatgaagaatgagcgagacggaaacaatatataactaccgaaccaatcaactagagtgccaagaagacccatgcggatcaagccaactacaagatcatcgaccgaaaatcacatttcctcgtcctagctttgatattcaccaatattatgcacattttatcaccccgattttgagttattttaggacttactcatttggccttactagtagaccatatgttgttaaaaatggatctttccatatttggttcactccaaaactatcattggagaccaagagagattcttagacatataggagaagtcttcccatgcagcagtaattatttctaagcttgatcctttcacaattctatttttcttttctagatgcattcacactataagaatttttaaccatcaacgactttttatctatcaaatctgctgcattttgaagacactccacacatcccagaatgttccaagtagtcgtactttctttcccaaggtcccaagatacaaaccacaagccttttcttatttggctgatttcatcatcaaagctccaatgaccatattctttataatttttgattatttttctcaattagcttctttatactgttgtttatgagcctataaaagctaagtctcgaggtcattgtaaaacacccattatcattgagttaataaaagtttgttttcagataagggtgcctttaatgtgtgaacatgagagattttgtgttttcccaaagaaattatagaccatttgatttctattgttcacatattaaagacaccctcatttttaaagacatctcttattttgatgaccaataaggatggttctgtcattttattcgaggaaaaagacacatataccaatattgaagttggtgtagaaccataaaaaaactgtattgcattatgttttacttttaatactcttgtattttactttgaatacttttattcaattatttgtggtttagatgttacacaatctccttagcaagtaaaactttaccctcattgatcccatccagctcgatcatgaatacaacaaccatttgccaacataacaaacatgtgaatcattgcttcttaaagcaactgcggtaacttccctcgtagaaggtatgccatcattattattaaataagattatgcaacttgagcatgaaggttgttttcgagatacatagaaaccaaattcttggatattctggacacataatgtgcgagtgaaatgcttggagcttaatttaaaacataccatcaaaatgcttacacttacattatggttttacaaacttatgaggtgtaaaggcaatgccaagactctatagacacaaaaagtttttcacttgcaccatagcgtatagctctaatggaatcgtcatggaaacccatcaaattcatccaccaaaataactggatatttttctctgtgaataaaacatttaaataaattaaagtaacaatcatattgaatactagatagatatataaacactcatctattctagcaagtttttttttaaagctagaaaatcaatctttgtgcaacaagataaaaaaaattacaatatcaatcttttaggaacatatggagtacaagttactaactacaacgatgaacaatgttgagtaattgtatgataaaaaaatcaataagccggtagggagaaaagagagaacaaaaaaaagtaaacaacttcttaaacacatgacaaaactaggtaaacctatttaaaaaaacacatgacaaaatttatgtgagttagacacggattgaatattataaaatatcaaaatatatgaatatgaatccgaatatgttggataaaaaaaaagaaattatatgttccgccagcgaatatatcaattcagatatataaaaagagttgaaaataataatataagagtatgaaaaactaaaaaaaaaaattattattaatatatatatatatatatatatatcatagaaaagttttcaaaatgattttataaacaagttagaacatcttataaataaaagtaagatttcacactatccttattaatccacttggcaatttatttacaaaaaaaatattttcaattaaaccacaaataaaacacatttaatgagagtcaaatacaatttagctgggttcaaagagagtcaaatatggtagctgattctttagcgaagcaaccgatacaaggaaatgtttcatctgtgtttcatttctatgttccttttaatatttctgatgcatttgcatcgtgactatgtagtatcatgttcttgattaataaagctgatgttcaaaaaaaaaaaaacacatttaatgatatataattaagtcacactattttttggtgcttacatttaactcacactttaatataaaactaaagtcatataaattatatatttactatatttctctacaaaattttattcacacacaatcaattagaattttcaactctcatatttatttttaaattgtaactctatcacttcccatcctacaaatattcattctctcattgactcatcctcttccactatatctcaaatctatttttattttttgtggttgttgttgtatgagttaaaaaaaatcaatttaaataccattgtaaaagcttaattttttcaaaaaaatttctaatgccaatacgttatacttatcccttctttatttttatttattttttatttattttgaattaacatatgtaaaataaaagtttttttttaattgacatatttttatttctgaattgacatatataaaataaaaaattgatggctataacaaaactttcaggtttattctcaaacattaccaatgtgtaattgtaggcttgtagctatgttcctggcttttagctttttggttccaatatgttttgttttgtttttaacatttgtgtattttttgttttttaatttttaataaaatagaaataaaagatttatgaaagacatattcaaaaatataccatacttttctatgtactcgatatttattttagttgatgttttagaataaattgtttttttaatttagatgatatttcaaatttcaatgcaaaattaattagatttcatattgattttggctatttatattttgcatattgttttatcatttgttaaatcatgtttagatagacaataaatattattttcgtttagaactaaacaaaagttaaataaattttttaattgatgtgcaaaaacctccaacatcaacaaaaaaaaaaacacggagagggtaatagacaaatgtggatccatatcgaaatccggaacaataatctgataatcccatgaacttcaggtatcgtatttttcatagcatatcgtatagatctgggattgagggtagaatttcagacattgtgcaccccttgatgtgaacaaatgtggggacaattctaagccacatgtcactatttccttggttgtcttccgaccattaataccccatctcccaaactaacactcttctttaacacacacacacacacacacacaacaacaacaacaacaacaacaaagaggctttaatgttttagtctcttgttcacgtgaaaaaacaaactgcaattggataaccacaaccagaatcgattttgaatcatcatttctataaatatatacgactcatacatacatatacatacctcttaaacaaaactgagatgagttttggaactcgtcttcttttgtttctcatactaacacttccacttgtaacatcttcatccccaaacactcttcatgtttcaggtttcatctcttataatcgatgcttctttcatttatgctttgattcattgaactatgatgttctgactctgttttcgggtttgaattggttttacttgttaggaattgtgaagacagggactacaagtagattcttgatgatgaccatcgaggattatgacgatccatctgcaaacaccagacacgatcccagcgttccgaccaatgcaaaggctgacacaacaccttaaaactcttctgagtttacttgtttagtctatgttgaataaataaatatatatataataatctctctcttttgactgagctgaattctccatttcctatactctgtatattattcatctgagtatcaaagcaaaaccttaagaaacaatgtgagctatgtatcaaccacacaacttgagtatattaacacatgatgttggtgttaaagacaaaacatgaacgttctggcacattagcttttaacataaacactatattgttgtctatgatcgtaagccagtaaggatttcagaaccttctagactagagtctacatcaatagctgcctgtgacgaatggtttcgtcatagttccactgatgagatctctcaactcaatctcccccggaaatctcccttctttcaatttagaaaacacctggcaacacaaaacattggatttgattagccaaagccgagagtgtgatatgatactgcaaccatgcataagagaaaaaagaactgaccaattctccattgcagctaacttcaaaagcaccagaactttgcaaaaaagactgcaagaagttaccaagaagccaagtggaagccatggacccgaatctattcgctctcaaagagtgataccaagcaggaggctgcgcaattccaatcatgggaaatatctgttcacctcccataatgagaccaataacacccacctgagcaactggcacaaccttagcaagaatacgttttggtgctggtgcagggtaattagcaagaactacatctaatccaggaaaaacactctctaacatcttcttcattgatacagcagttcccctacaatacaaagactaatgaatcaaatctaaatgatgataaagcttaaagccattgacttagaaagaaatcggaaaagtacttgtacgagcaggagatgcagaagttgatctctacggtgtttccatatccaacaccagttgacttctgctaaaaagacaaacgattagaacacaagtggtgtgcgagatgttatgtaggaatgaattcgacttcacctgtgcggggaaatctagggtttctgagatagacggtggtgattggtgctgagatttcggcggtggaggcgtgaagagattgaagagatcggaacaaagcaggaaaatcggtagtcctaacaagatcaattgtgttttgtccatggcggattttgaaatctcagagagggaatttgaagttgaaattttgaaggagatcgatcggagaagagaacttttatcacttatgccactttttttaaaaaactgatctggactgccatcagtgaatgtcaccgaaaatgtgatataccagttgtacccttaatgagttgattaaaaaaataaaaaagaaattcaaaagctaaataaagaaaatcgagattctccgttctctcttcttcgtcgtcgtgttcttcttcttgcgtcgacgttcatcttcttcgtcggccaccatcgattccggccgccgccgacttgaaatccgtcgtaaaaggcaacgaattaggtcagtttcttctcatatttcctttgacattggtgcattgtgattttagattaggattttgaattatatataattcccagattcaatttgatagtttgatgattggtttgcaaagtaaagagtaatcgattagaggttgccgaaacgttatttgaggtgatgagcaaaggaatgtaggttgaatgtgagttgaatttgaattccgagatttcatattaaagatttggggggtttcatgttagttgacaagatcatgaagaaggttgcgattgatgaagcttctgtgaagttgaaactgagttacaatctgtctaaagttaggagagagacatatattgtagatgatgaggatgtctttatatttttaacagaatctgatgaagagagtcggattcctgttttgcatgtggagaaattaaatggtataggagttgagaggagagaggaaatttctgtaccggagcgtcgaagttcagttggtgtaaatgtaagaaaagatgatgttttaaatgaagtatgtgagatggtgcatgatggatatgataatgatgtgaatgattgtgagaatgtagtaggtacggagatcgtggctgtcgaaaggccgatggaaaggccggtgaattctgttgaggaagaagatgaggatgataggattgattatgatgatattcacaatattccacgaagtgtagaagttactccgcaggttatagaatgggatgatggtacgggtattgaaattggtcaagaattttgttcaagggaggctgtgtgggaattggttaacagagctgcaaagcaagaagtttttggagtctatactattaagtcagacccgttgagacttatgctacgatgccgccaagcttctaaagggtgtacttggtatctaagagttgcgagaactaagaaatctcatttttggagtgttagagtgcatagaaagatgcatacatgctctcggagtgttgagactacaagcaacagtatacagcgaggcacaccaagattgatagcatcggttttgcattgtgactatcccggaaatttagagaccccaactccaaacaacattatgtcgattgtaagaggaagacttggggtgcattgttcatactccactgccttaagaggcaaaatgctacatgttagtgatgtgcgagggactccggaaagaagctacacgatgttattttcttatctttacatgttagagaaggtaaatccagggacagtaacttatgtggagttggaaggagagaaaaagttcaagtacctcttcattgcattaggcgcttgcattgaaggttttaggacaatgcggaaagtgatagttgtggatgcaactcatcttaaaactgtgtatggtgggatgttggttattgcaacagcacaagatcctaatcatcatcattatccacttgcgtttggaatcattgatagcgagaatgatgtaagttggatttggttcttagaaaagctgaaaactgtatattcggatgttcccggattggtctttattagtgataggcatcaaagcataaagaaggttgtcaagacggtgtacccgaatgcgcttcatgcagcttgtatatggcatttgtgtcaaaacatgagagatcgtgtgaaaattgacaaggatggagctgctgtcaagttcagggattgtgctcatgcatatactgagagtgagttcgagaaagagtttggtcattttacaagtttatggcctaaagctgctgactttcttgtgaaagtagggtttgagaaatggtcgaggtgccattttaaaggagacaagtataacattgacactagtaattctgcggagtccattaatggtgtgtttaaaaaagcgagaaaatatcacttgttaccaatgattgatgtgatgatttctaagttttctgaatggttcaacgagcataggcaagattcaagttcttgtccaatcacagcacaagttgtgcctactgtcgagaacatattgcacattagatgtccaattgcagccaaattaactgtgtttgagcttaacagttacaaccaagaatacaacgtgattgatctcaactcggtaagttttctggtggatttgaaaatgaaaagttgttcatgcaaatgttttgatatagacaagatcccgtgtgtccatgctatggccgcagccaggcacctcgcccgcaaggaagggagaaatgcgaatacaaccatctacggactctgctctgtgtattacttgatagagagttgggcattggcctattaccggacgttgtatgtagtcccacatgagtcggtttgggttcttcctgcccatattaaagagttagttgcctttccgccggaatacacaccaaaaggaccaggacgaaatcaagagaagcggtttccatcagttggtgaagcgcgaaagaggagaataaatttggaggcttggctgcagcctgaggaagattaagtctaatgcagaaaaggttaaaccggaacaacctggccaactgcagaaagggttcaaccaatacaactaagttcatttgtatttgtattatattatttgtaagtgtgatgtactatgttttatgttttcgtatttgtattgaattctttgcaagtttattgaattatttgcaagtttaatgtatttttttaagttcaactgagacaactgatatatgtatctgtattttaggattaacaaaatgataaaataattctcaatattttcagctattatcaacatctaaacattgaataaatccaaaatatgatattacaacattgttattactaaacttgatcataaactggtttcttaataaatcacctatgtataacaaggaacatatagttcatgattgtccaatgtacatacgttatgtatgaaaacagatatttactaaatatgattctatcaaaacttattaaaatccattaatatgttaaaacttatgggaccaactaaaaaaatgagttggtttttcagattcaacttcaaaaacacaaaatttagaatagttcaactgtttgtgattccggccaactgtacatatacatacaactatgtgtattctcaatattctaataaataattttaaaaaaaaaatagaccccacgaagtcgggttcacactacgattattgcgttcacactacaaagtttctacctatttattctcgttcatctctctttctctctctctcttctatttcacttctctcgttcttctctcttcttcctctctctcgttcttctctcttcttccttcccaacatcggcgacgacaactgaaaatagggttcccattattcgccgccgccgacgacaacaacaacaaccaaggtattacatgcactggagttcttcctctctctcgttcttctctcttcttctaaagggtttctagccgccgtaattagtagatctaaggtttcttacgggtttttagccgccataattagtaaatctagggtttcttacgggtttctagccgccgtaattagtaaatctagggtttatagcgttcatgattcatatctctttctttctctgttctgtagatgccctatagttactctcaaccatccacgtccgaagctagttggaatagtggaaaggcgaatgccgatgcaaattggggggttccagaaaaatgtttttgtggtaagcctgtaaaacttgaagtgtgcaaaactggttacaggcaaggcgacagagtctacaaatgcccaatgcttaaagtaagttattgtgttttcatttcattggaacaacaaagtacaagtgaattatatttatgaagtcttctctctttcgcaggctgaagagtacgagtcccgaaaccaccttattcagtggtgggatcaggcggtaactgaggagcttgagaaggtaaatcacaaacttgattccacactaagacatggacaactagcatgcaatcatgctttggagtccatccgggaaactattcatctcatgcaaggcgaaattgaaacccttaaagaaaggttactcgccaaagaagtcgagattgataggcttaaggcattactttctacatggtgattatgatgtgatttatgttattgaggatggtgtatggcatttgaacttaaatatgttatgtttcgggattttatgtaatatttgaacctaattagacatgtatttacctattttaagttatgtgtattgaccggccaactgggacaacttagctactcttgtattttaagttatgtgtattgaccggccaaatgggacaacttagctactcttgtattttaagttatgtgtattgaccggccaactgggacaacttagctactcttgtattttaagttatgtgtattgaccggccaactgggacaacttagctactcttgtattattgaccggccaaccgggacaacttagccaaacgttttgattttaataaaatcctaaaacacataaaccatttcagaaaataagtttgtcctctacacataaactacgcataacattcccaaatacacaaaaagaaagtcttattttgacagacacctaagagtccacacacacacataagcaagaaagaattttcaaagtcctaattcttctgtctcttcctcgtttgcttcccctcagctgtaaactcttcccccttatacttgaaaggtttccttccacgtttttccccagattccagagtaggaccaacatgctttctcttcttcttcgatatctgcttcttcttatcctcttcatcggactcatcgctgccatcacctacaaaaatatgtaaccaaacatctaagaactattgtgaaagcatcactacacaaaagttcaacaaaaactcacttagagactcaatagttggaggtgctgggtcacggattccactgtgaataaccaaggccttgctctgagtatcccttggctgataagacagtggcacaaaatcagcagctgaaccaggacgtatatcttcataacgggctttttctgcctctttctcaagctgatctgccacatattcctctattccttgtactctcacacaaatccgcttgatttcgctatccatcacagcaagcttgtccgtgagcttgtcaaatcctctctccatagcttccttgaacgagagaatcgatgtcccagggatttcaggttcaggtacagctggaacatcatcaacagtttcaatacgtctaccatcaatgtctgcttggtagagactacgccagaaaatcttctttttctctacgataagcctctctctccaactatcaacaattggatcgatatatccaataccatcatcaacatgcttctctacaacgcgtgacaacatttttctctcatccatatcaggttccaagatgcttgaaatatcctgtcaagtaaacatatatttcaaacaccacaaagattataaacatagatttcaagagaacaaagctaaccgttatatctccaagtgcttcatttatttcttccaaactaaatcccttcatgcaactttcattgaacttgtgcttgcacattcttgaacattccttgtttgcaggtacagcttctctaaatctcttcccaagctgcggaatgcactcaaatgccagaatctagacacaaaaacataaaagtaaatgcaagttcacaataacaaaatctagccactcatataatttactcgactacttaccttaagtggagtaataaatccataaaaagcagtatgtgtcttgggtttcaccacacctttcatgttcttcattactctctgcaccccttccatacactgctcaaaggaaaaacgtccccacgggaatgtctcacaagctctgacattatccacaatcctaagaagcaactcctctatcttcgaatcccctttagaatcagctttcataaccttagctaagaataacagaattgccaacttcaacctagcagtagacttctcactcttaaactcttccagcttctcttccacgtctttaatcttgatgtcctcagtcctcttaaacaacttctcaacaaacttcaaactgcctaaagtcttattgttttttgggtactcacggcagttcaaaccggtcaacaatgcatgctctctaattgagtaccttataggtactccattgacaacaaaccaacactctctcgccaattctgtcttagccgtgcgaaccataagcatccacatgccttgaatcatgtgattgggctccttaggcatgtggaatatgtgcttaaattggtcatgattcctaaaccacttcagttcttcatccaaagtctctataaattccactgtttgtaccaactgacacctcgttcctatcttacacaccttcgtgtaggtagttggatcaaagtacataacttctggcggcaatggttgattatcatcatcatcatcatcatcatcctgcatattctgcggcaggttatcatcatcaccatcatgcatattctgcggcaggttatcatcatcaccatcatcctgcatattcaattcaaaatactttcaattccacattaactacctagttgtactacttgttcctgaatgaccattcacaaatttacgacctagttgtactacttgttttatctgaagcagcattcacaaatccaatcatttaccaatgcataatatcctaaaacgagcctaatacaaaaaataacggtcttctatcataccttatttgctccatcatcatgttgaacaactgcattcgttgcttcttcttcttctgcacaagaatcggcatttgggtctgaaagatcgtcaattgactcccatgcgacggcgtttgaattacccaaatcggcggcgtcacaaccgccggttgtaggctgaatttctccggcttcctcttctgttgtaagaagctctgcgccttcttcatctctttggggaatctcggcggctgtctcttcgactgatggaggaatttcgccggtcgtttcaaccctagttgattcatattctccagatgagtcttttactctagccatatgaaagagacaaagacgaacgaaaacggagaagaaagaagaatagaagagattgatttttccggtgaaattggtgtcgtcggagacgagagaagacgacgacggagagaagaggaagaagtcgagaagtgaaaagggggaagaacttaggttttttctgtagtttctagggtaaataatacaactgggccgagtatttacatttttctttgggcccgagtccaacaaattaagttttcttgtagttttcgtggtttcgcaagggtttttcgtcctttcctcaattttcgattttaataaaaatcaataatattattccaaacataagaatggcacgagtgattatttcttctccaataatggcataagaggtgagctctccggagaagacaacagaagaagtcaattgtgttaaatagatgacaacgtccaatatttttgtaatattacacttttacacccccatgttttgaaagtacaagtacacccaataaatttttgaaataagctcacaacccccattaggcccaaagagaaaaactaaatggtagattaaccacttgataaattaaacagagaataacggtatatttctttgaataatttccgaagtgagtatagccgtcgatacgtttaggatgaagtgtttgggtactcattcagatttggttctggtctttttgttccaatttagttttttacgacccatttgagtactttatatgtttgagtcgactatgaattcggttggaattatttcgaattcggatatttgaaatatcaaaaaagaacttttaaaaattgactagatttaattttttgttatcaaaatttaaaatttttggtaaattgatttattaataattagtatttttattttataattatatttcagattcagtaacaaaaaaaaaatcattttttcatcgagttagtactatatacaagtatctaaaaccagatttatttttgaggttttagatttatttttggcaaatcgacataatataatacataattgaaacttataagattgatgtacatcgatctacgtaaaagcggtacattcaaatcttacaaagaaacaaatttttacaagatagattatacattcagatcttcataggaaaaaaaaaggatcacattcttatttttaaaatcatacaaaacacttcacccattgggaagatataacacatatttcatccatttctccttcgaagttatgactgaatcacaactccttgacccatcatcatcggcatgttgtcaattgccttaagtggtggtatggtcaatgccacgttcttgccatcgtaggccgaaaggtgaactccgatagcggctcttcctgatggatccatattgttggaccagcttgcatcccactccactgcctttgcagtcgaacaagccacggtggcacctccaggaaccgttagtctcgcagagttcttagaaaaaacgtaacacggaagtttgtgaattagttaacgcaaaacgaataggagattctgttacatcatggagacttataagactctcacctgcgggaagaacctttcaaagatcattctgtagtagtaagcttctttagtgtttggagtgttgtgagggaagatatgccccgcgttcgacatcatcttgtcattgaccttaaaacagaacagaatcattagatctgaacatgaatccaaatgttatattttagctaattaggggagatatgaaattttttatgtgtacattttgagcagcgtgatctttcaggccatcgatccaactgtagccaacaccatcactgaactgttctttctgtctgtagagaatgtgttttggtagataaggacgttcttcgtcgtcaaaggctctccttagaacccatttctcgatccttccttcctctggcttgatctagaaaaacccatatagaaaatttgttcaacgttaacttgtgaaggaaggtattgagtttgtgatgtgagttttgtagttaccatcttggattcagggtcgagagacatagctgtgttgatgaagtctttgtcaaggaaaggaacacgtgcctctagtccaaaggcagaggtagatttgttggctcttagacagtcatacttgtgaagagccttgatctgcaagttatcaccgaacaatcatatcaagataagtaaaaaaaattgatgatgtcttatttggtggttgaattgaataccttgcgacaagtttcttggtgaaactctttcttgttaggtgccttgtggaaatagaggtaccctccaaagatctcgtccgcaccttcgccggagagaaccatcttgacccctagagacttgattttccgggacatcaagaacatcggtgtgctcgctctgatagtcgtcacatcataggtctcaacatggtaaatcacatcctctatcgcatcaatcccgtcctgcaccgagaagtggaactcgtggtgcaccgtccccaaatattccgccacctctttccctgccttcaagtccggtgagccctaacagaacaaccataaatgatgctaagtttgaatttcgaattagaaaaaacacttttaaatcatccaactctcctatcaaaaaaaatcatccaactctgctttggaaacagaggaactctgttctatatctcacctcaagaccaacgcaaaaggaatggagctgaggaccccattgcttagccgccttagtaccggccaagtgacgtgcagtgatggaggcaacaagggaagaatcaagaccaccagagagcaaaactccaaatggaacatcagtcatcaaccgcttaatcacagcctagagagaaaaacaaacatatttcagattaccctctcacacaccacatacaattaaaaagaagagatgttttcttacgttttcaaaggcgcgtcttatcgcaagaggctcataaggcgttgaaggaacagattcattgaaccaaggaggattataccattgcttaaaccctcctaatttgcttgaataaaaatgacctggaggaaacgtttcgaaatgctcacagtcatcgtttaggcctttcatctctgaagatatccacacagatccgtctagtccccaaccaatgtagagcgaagtgacaccaatcgcatcacgagccaccatgaaagagttatctcgtgtgtcgagcaacacaaaggagaatattccatccaacatatcaacaaaatccacaccatactcctcgtactatgtccataaaacacatcaaactcaaatcaaaacttgataaccacattagcagaagaattaaaaatgataccacacttaccaagtgagcaatgacttcacaatcactaccagtacggaacttgtgattcttcagacgttttctcagctcctcatggttataaatctctccgttcaccttccaaaccatcaacaaacaaaataaatttcagcttcaaaattatcaaaagagttattattttatgagtccatggatatagcgttaccgtgacaacaatggtcttgtcctcgttgaaaagaggttgatcaccggaagcaggatcgatgacggcaagacgttgatgggccaagtaattatctccgttctgatataagccactccagtcaggtcctctgtgcctcaatctgtaaccaaaagtttggaaaaaatatacaattatacatttataccatttctagggtatattccaccaacaaaaaaagatttagattttttaagagatatccacataaactatgcaaaaaggtgacgtttaatttgatcaagcatcactgttcatgtcacgttcagtaaaaatggtccaagaaaatgaaaatattgacaatactacaaaatcaaattatgtatatcgtgattgtgtaaaatgagatagatgacatcaatcttccttaacatatttctgaaacaataaatttagtattttaagatgtctaacatcaaactaatcatcacgtaattttgcacaatttagaatggttttaaagtgacaaaacaaataattttcttattttgaaaaccaaaaaaaaacagaggaaaaatgtattgcctgcgagaaagctcaagaacacgaactctcttggcctgagaatcatcggaacatcctaacacggcaagtattccacacatgttttttttttgaagaaagtgaaaaagatcacgaagaatgagaacagaaaaacagaattttccgaaactttaggggatagatattgtaaaaccccaaaaagagattacaagaaaatgtaataaacagacagatgtccaggaagagaaaggagaaaattgcacgtagaagtgtactatcgatattcgtgtttttgatgtcttggttttctacgaccgattgctctatttatagacactaaacggcgccgtgatgtcgcgtttggttctgaaggagtcgtgtatgggaacaaattatttttttacttgtaaccggataagttaccggataactctgaccagctgtttccacgtgttaattaaccttcttacgacgtccgatgggttcttacttcttagtctttacattctcttttgtccggtttcttccaattttgacggtggggcaaacttccggtttagggtttatccggctgagtcagcaagtggataggtacttatctgacggtgtaaaaactgtccaatgattgttctgattgctttagagccgtacacgtgttatcacgacaatggtgtatttgattgtaggattagcattttatcagaaagtgaacacatttcaaatgaaaatgataagtaaactgtgttaggaaaaattgattggtatttttttccttttgattaaaaatgagaagtaaagttaagacttaaatttaaaaaaaaaaaaacgttaaaaacacatatagaagaaatatatcgtactatagttagtaaataattttctcttcctataattagtaaatattcaatatcgtcaacgaattattatttgtatagtctaatagtacacacatattctcaaccttggaatcgaattataacaatacaaactgtaaaattaaaacacgaccctatatggctattgcaaatggtgatttcacaaactttatcataatattaaaaaatacatttacttcttactaatatacagtaaacaaaagtctttgtgttatagttaagcctattttggatatatgtgtatttaaaaaatatatatagagagatttgccatgtgttatataacaaatatataggagatagtggatcatatgcaactttccgcgaaatgaatatcggagaagtattcgagtgtatccataaatcatgtatattttaatataccggatcacatgtgaattgtaggtataggcatcgcacatgcctcacacgttgctacaatgtgcaagggcgagaagatgaatctcagtttataatctttggactttggataatgctaatatataaatcatcaaaataagaatatgacgtgttttttctttgattggacaaaacgagatatcagccctattcttgaggcagcaagacccaatcgcgacatgatacattgtaaatcgtttgatatttttttcttttttatatgtaaaaattgctggtgtccctatctatctatatggtacaccttcagctataaatgattgaaattctcttacaaagactgtaaatacatatccgaacagtttggatactagtaccaaaaatgataatgtggtgatttaggcgacgtgagtcgtgagtgtagctgttattattattttatcaatacttgagacgctaataattgttaagatccatgccgtgtcatgtttgtataagccagtttcgttatcaaataaacagataacgaagaagattcttatactttgtgaaaggaaaatagaaaaacagatgacgtataacagtttgttcggtgaaggaagcagataaaaacagcctaatattcaaatgtatgccaacgcaaaaattgtgtttaatatacaaaacacacaattagttacaagtaccctacaatgttaaccaaacgtcattttgtaaaagtaaaggactttcaaacgcctcatagtcctcacaaagcgacatcattcgtaatttaattacttccggctggtcataacatacttatatagttggtcaattaatgaattagtaagtgggattgcgtaagagaatatcccattagttaaaaaaataacagaagaagaaaatatcacgtttataataagtttgggcataattaaaaaaggtagcgactcgtcgtctttcatgaggtcacgatcctagtctatctggcaaatcatcatctacgagctacggctagaaagaaatagacgctaccactcgtgcacggccgtgccatgtcatcttcgggcataaggatccgaaccttagccagctggttctccgacttcaacttacattactagtttttcttaaatattattattacattacataattagtttggttaaattgtttttctcttattgaattcatataattgtatcttttgtgagttatgttcttgcaatataaatctgttgatctttttttcatcaatataaaaacaactaatattaccaaaataacaaaatcataatagatacggcaattcgacttttaaatgaatcaaagagttaatatccacagaggattaaaatagtagtttggaaaagaacaaatggtgatgaaactcggtcgcaaggttgcgtagtacatttcgttatcactgttctaaattaaattagaaaaatctcgtcatttgtctgactataattttatttcttaaaagttaattgtcatgcactcatgtccatttctttttttttatcaaacataaatattatccatctaagttttgaactttatatttttctcggaaaagtacgaaaacttttattattgtcattcacacaattcagagaagaaacaaaagttgtaaaatgtggcctgcgcttgacataattccacattcagtaatatttggtagttgaatcatatttatatttcagtgttgcacttgtactgatcttttggtttcttacaatggatcatatatacatttttatttttatttacctcatcagaatattctttttttctagccggtatatacttccactgaataattaccacactcgatttggactctgcatcaaaagtcttgcaacgagatagtacgttctgcgaaacatcacgtttccatgtatatcgtgactagacaatgagtcgaaatctactttgctcatttaacattaacttcccttaacttacacggaaactctatattttgaattttcattacaatgtaatatttttttaattatataattccaatcttcggtaattgacagccagataatgacattgacattttctcatggtaaacttttaaacattttcacggtgaaacaaaataattaaatagcaaagtgttatggttaaaacatttttgcagctagataacaaataaactggaactgatttgccacttaaacattagtggtatataaacgttagaaattcttgcacggttgatatgaaaatggctttgggttctcatacacaattcttgttattttatttagtaatgtgttatcatgtaaaatagtgtgtcatcatgtaaaaacaacagtctataaagcatgttatcatataaaaagtaacataatatatatcatgtaacattagtaatgtgtcatcggataaatgaacatgttatttattttcaaattaaacaaatataaaatcgttaattcttttgggttaaaatcttaaactcacctcaaaaatatttagcaaattaaaaaaaaaaaaaccaataaatcatgtctcatattacttcctaaaatttggctatcttttgttgatgtttttggtctgacctaaaaaaaggtttggctatctaaatctacctaaaaacacacactaatacaattcgatactgggcttcaaataaaaacaaactccttcattattgggccaccataatgatcgacctcacaatatctcagcccaaggttactttcgtcatttaaactctcctacacttaaaaaccctaatctctctaccgtcaataaacctccctatataaacacttccacacacaaaccattcctctcacacaaaattcttcagccgattcattctctagggttcatagcttagtcctcgaatccatatatctctgctgctgtgttcttcaattgctttagtattagcttgttcttagtgttcatagaatttagggttattagaatggcttcatcagatagtcgatgtggatttgtccgttcccatatgattcgttcccttgaagcaatattaatcgtgttgctctcgttctctaaattgctctctaatcatcaaagtaatcatacggttaattctagtatgataccgattagtgagcataacttgagcagctacataatcttctcttacgagggttttgttttgtcttaattcttgttttgttgtggaagaacagtgatgagtcagtttacagacctgtaatgattgcggtaatgatcgcattattatgaacatctaagggactgagttcttctatccattgtgttttagttttctttttgtcttggtggcttttacatgatagaaagattcaggctttgaatatattttagatgtgaagcttgttgtgaagtgtaattgcctacattgaatttagtttccctcgctatcctgttcttcaattttcaatgatgtttcttaggacgtcggggaacaatatgttttatattgatgttttgttattttgcaatgggatttcaaatgaggaatactttgccaagttgttgaatgctcagatttttctgggttttatgattcacttgtataggaagatctgatgatttccttttgcattgtgtttttgttttttgtttgggaagccagtgatgattagattcaatggttgctgaacattcaatgttgaaaagcatctaacttgactaggacggtctgaggcttttaatgaactttttgtttgctctatcgttagttttgtgtccatgattcaggattgttaatgttttgtgatgttttggatgatgagaaacaaaaatcaaaatacagttatccctggcttagggtttaaagcccgttgctgagtcttttgtaatctgacacacatcacaacaatttctctttacgttcttttggtacgatgcttttgtgttttcagtttatcttaactttgttttatttctcaattttacgattcatggttctgtaaatccatattgggcagtcttttcataaacaaaacgaggtgtgatgctaaatttcattgggacaacgctatattgtagaagacggtgaagattgttatacgttttgcaaggcagggatttatgatgacactctccggtcgttttgcttccttgatgcaattgtttttccaatttaggttttgaattattactcactattttatcagggtagcaacattacctgaaagtgtctctgagctatcacaaagattgaaagaagtttatgtgatcaaaactttccttttaactttattgttttcagtattagctatcttatgttatgtatatcaatgaatgtttttaacgattaagcacaccctttaatacagtcttgtttaagaatattatggatcaagatcaaaaatttagctgtacgttcaggtaatgaatgcgatgttctgaatgagaaatgaaactaaaatcatgcatttagataactttcacatcacttgatagagagggacgatatttttgcaggatttaacttcgtaattatggctaacaaagctaccgtctttacattatttgctcggggataactgaaatacctccctttctagctttaaatgtcacttaaatagccttcgcttgtaaaataaaagtttgaatatttaaaccagaaagctaagtagagaggttgtgatgggtctgcaaacatggatatgcttcacactattctcaattttcttcttcctcctcttactatcagttttctcgtcctattttacccattttatctttttaccaaacttatgagttgtcttaagcaccttcactttgaaaacgttactgggaaagtagttctaatcaccggagcttcctccggcatcggagaggttagctagtattggatgttatgtttaatttgtttgttttggttggtcttatctataatttttagcaacaaataaaaacaatgatgcagaaagttttttttaaaaattatgaatgatatgtaattggtacataatcacgtttggaaaacgaaaacttgaattcaaagtcaaatattgttttggacgttctatcatcatacatatgtacgaccaattgatcctttatatttgacgattgctcgagtagactatcatccgtgaacagtaaaattgttatttggaaatatattcatttaaaagaacttaagtttatagatcaacataaattgatatatgttcttgtttttgttgggtcggaataaaaaagcatgtggcatacgagtacgcaaagaaaggagcaaaattagctcttgttgctcgaagaaaggatcgtctagagattgtagcagaaacatcacgtcaattaggatctggcgatgtcatcatcatacctggtgatgtttctaatgttgaggactgcaagaagttcatcgacgaaacgattcatcatttcggaaaacgtaagtactcgaataaaatgatttattatctactgtattaatgttatgattatgaagttcaaattatttttgtcaaattttattagatggttattttcatatctaaacagtggaccacctgatcaacaatgctggagtacctcaaactgttatattcgaagatttcacacaaattcaagacgctaattctataatggtgagtttttaatgatattcttttacaagttcattaataatccatatatttacaaaaatgcttagctcttcttaaacatgatttgattgcttcaaacgcaagtattaatgaacttgtaaacttaggttttgaatggatgttgtggttagtgtggactaatccctcagcggtctagtctatactgtttttggggcggacaataaaccgctgcggagttagtttaaagacggtccacaattagcccgcaacggttttattttatttttttgggtctgcactgtagacggttttgttcgcttggaccgctgtaatcattcgaaaccttagaatttagacatgtaggctaaattttgattgcttcaaacgcaagtattaatgatgtagttaatgttaatctgatacatcgatcaaaattcaaaccctatatttgactactacgtacatctaatttgtattttaaggatatcaacttttggggctcaacgtacatcacttattttgctattcctcatcttcgaaaaagcaaaggaaaaattgttgtgatttcttctgctacggcaattatacctttgcaagcggcaagcgtctattcagtaagataaacaaaatccgtaagcatcattattggtggtatcttagccaaattcttaagctaagatttgtaaaaaaagggctcttatataagagcttttaggcttatatttaagcttttatataagaaccctttcttcacaaatcttagtttaagatttggctaagataccatcaataatggtggtcttacacgctttttttttatatgttatctttttacatacttctcatatacatataaaatttatatgatattgatactacttggtatgaccgtatgatgtaggcaagcaaagcagctttagtaaaattctttgaaacattaagagttgagatcagtcccgatatcaaaataacaatcgctcttcccggatttatatctacggatatgaccactcctcagtttaaagaaatggtcagtgataactttcttgtacataatttaataccttatatatatgacattaacgatgttatgtgtaatgttttttgtgctttgttgaaaattagtatggttcagatttcatactttcggaatcagtgagtcgatgcgcaaaagcgatcttcagaggtattggtagaggagaggcatacgtcatagagccatcttggataaaatggatctttttgataaaaaatgtttgtcctgagatcgttgactacttactcgactatatatttgttagttatctaaaaccttatttcaagcgtgattgatcatatcgatctatccaagttctctctggttttcaactgtggttgtgttgtcattatggccatgaaacttatactttatgttgtattagttattgcactaagtcttggcctttttccctttcttcgtatatgtttcaatttgttttagaaccaaacatttcatatagatagaggatttcttaattatttaataaagatgattcaaatgtatataattgttcaactagttcagttcgcttccaaaaaaacagcgacgtcttctctctcacggcgataaaaacagagaaccttccatttgtttctttgagcgcgtgaccggcgcgtggcggcttagttagcgccggcgtcggtcctccagtctggttttctttagggtttcattctctacttagtctggttcgtttttagatcctgatttgatgttggcaaggtgaagaatttttggatcttagatctgtaagagccatcgttgtgggctttgattcgtcgaaggttttgtgcgatcggaactcccttttctctgttttgagaaaattatgggtttctcctttgttcttgcagatcttgtttccgacgaaggttgcaaacgaaagttatgacggcggctaatgttattggtggtctggctccttctttgggatagggtggcaacggtacaccggtattttagtgttagttgtctcataattgggttttgcgctttcgttaaccttgttctcttcatttctcttttgggttcctatcctttagtcttcattgttggcttgttggtagcgtttatggaatcaactttattctcagtcttttgtggtctagtatcttgaactcttgcctattctatgtcctgccgagtttgcttgtttctcgatccgattcgttctcttgccgtctccagtcttcggtttgttgcgaattgtatgggctcggtccttgtctctacggtttagacttgatcgaggtctctcttttgcattggtgtcttactaggcgtgaaccaatcttggttttgtttgcttcgatttcgccgtttccagaagttgtgtgggatttctagtcgtctcccattcttgctggtatggatgctttggttctctttatttgtgaggtagtcttcatttggtataggaagagtcgctatccggtgtcgtggattttctcgtctccattggctagccactaattcaagcgtttctcgtttttggattgataatttgcaagatgtttggtgctagattctgagttatgagttttaattccctctgatgtttgctttcttagccgtcagtgttttgacttgtttcttttgtagtgttgttatttgctccccattttcttggacttagtttcctaggatatcttgttatccttcgggttagttttcgggatcatgtattgatcgtcgactccttgtatttcacctagtactcatcaatgaaaattaatcttccagtgaaaaaaaaaaaatgtatataattgttatggaatttctgtgtccagtccatattaagctttttacatatatatatagcatcgaccgcgaagtccgtaacaccatctcttctagaagactcggatttcattggcagaggcgtatgctcctttggatctgatagttaaaacaccaaatcttgtgtaactttcttgtatataatgctctgtttaactttcatttttttttagtaatatttacattcctagcaacaaatatttatttatagcaattaatatatatttttagtaataattacattcctagcaacaaatatatatttattttttaacaaatacacaaatatatttttagtagcaattaacctattttcctaacaagatacaacagaagaataagaaaatagtagacagatagatccacttgctaccatttcctctccctgtagccttctgtgtctattaaaatagacttcacttgtaaagtaaaagtttgaacattttaacatataaaaaaaaaaaccaagtagagaggtaagtggtggtattggttctgcaaaagaacattatggatatacttaccaccattctcaatcttcttcttcctcctcttactatcatctttctcttcctgttttacccattttatcttttgatcaaacttgtgctttgtcttcgtaagaaccttcacttcgaaaacgtagccagaaaagtagttctaatcaccggagcttcctctggcatcggagaggttagttagctttggatgctatgcccttttgttagttagtatattttttttaccaatactaagtaactgagtagatttagtctattatactattactgattcaaatatatgtgtgtatatacataatatagatccgacattggtgatagtgtttatggttttgttttcgaggtcctattttgtcgtggaatctcttgcaactatatgtgtgctatttgatctatttgataatagacgactaaaaataactaaatgtatagatccacataaattgatatgatatttggttgagaacttgagattgttaatgttcttgtcttgtttggttggaaaaaaattaaaaagcatgtggcatacgaatacgcaaagaaaggagcatatttggctcttgttgctcgaagaagggatcgtctagagattgtagcagaaacatcacgtcaattaggatctggtaatgtcatcatcatacctggtgatgtttctaatgttgaggactgcaagaagttcatcgatgagacgattcgtcatttcggaaaacgtaagtactctagctaatatttaagtagtaatgtagatcatggtagacataacaatacgtatatggcataaataaagtaaaagttatttagattatcatactaatcaagttatcttattttaacagtagaccacctgatcaataatgctggtgtatttcaaactgttcttttcgaagatttcacacaaattcaagacgcaaatcctataatggtaagcttcctccaacttatatcaatggtaatccaaattaaagtaaaatccttaccttagttgtggagtatatatgactttaattgctttagactcaaatcaacaatttcaaactctatattgattacttcatctaatttgtgtatataaggacatcaacttttggggtacaacatacatcacctattttgcaattcctcatcttcgaaagagtaaaggaaaaatcgtcgcgattacatcgggttcagcaaatatacctttgccattggcaagcatctatgcagtaagatttgtctttagagagaacaaacaaatttttctaacctatttattatgtacataatattgatgttacttggttattttggcaggcaagcaaagcagccttattaagattctttgagacattaagaatagagctaagtcctgatatcaaaataacaattgttctcccaggagttgtatcaacagatatgaccactcctcactgtatagagaaggtaagtaataacatttgtacatgtaactatatcatatacatgttacactatattaattctacgttttctgtttgctttattgaaaaatatagtatggttcggattttattctatcggaatcagtgagtaaatgcgcaaaggcaatcttcagaggtattggcagaggagagacatacatagaagaaccatcttggatgaaatggctgtttataatgaaaaatgtatgtcccgaaatcgttgattacggacttaactatctatttgttagttatctaaaaccttatttcaagcgtgattgatcataacaatcaatcccaaatctataatctttttaataagggttgtgtacttgtcttcctatgatgactatttttcaataaaatgtataatggttgtttcgtttggtctttggaagacgcatttcgtgtcgtcattcaccaaggtttttaaccgcaaatatttgacatttgacacctttaaataagaaaagaaaaagtaacttgatcatagaaaatctcattagcttaaatagatgtcatttagacattttgatccaagatctcatcagtactgatcatattggattattgacgcttatgagtcctaaaccaaaaacaaagctattgtatatgtaacatgttattagttattgacatagtatggtctagcatttgttcgagtcttgtagtagaagaatgacacggcatggaaaatatatcaggatcgagtataattggccaccccttagaaggtcatgtgcttgtcccgtgcttaaggttagaaaccatatggacatagttctttcgatggtttgcaccagctctagatcaggggttcgaggatgcgtaagaaatggttcatggaaagtgagactagtgtcctcgtttaaaacagtaccatattcttagttctatttcggtttaccacatttttagtgtaacaagttgaaattaagaatgaaagcaagatcttgaactggttcattaaggtctcttatagatgaaaaaaattcgatagacaaaaaccacctcagaactatcaaaacccaagaaacaaggttgcaaacaaaaatgtaggaccagaaacgataaaatacactcttttgaagcggttttggaccaagtgtctaagagtcagcaatagtgacctcgacctcaacaccgggctcaatggtgatagacgtgatttgcttaacaacgtcaggggagctgaagagatcgatgacacgcttgtgaaccctgagctcaaacctgtcccaagtattggtacctaatacaaaaacccaccatgaaaccgtgtcaagaaaagtgttctgttttgcatgaaaagacattcgatgcaatacttgagtttagcaacatttgaagaatgtagatgcagagaggatgaaatgagagttaccttcaccacaaggtgcctttctggtagtgatcttaagaaccttagtgggcattctcactggtcccttaactctaagtctcttatccttagctccacggaccaaatcagtgcacactaatcaaacaaaagcatcacagagagagaactattcagtattcaactctctgaatccattctttaatctcaaatcagaaagaccaatcaataacattacaacaatccaaaatccaatcttgccacatttgggatctgacatttcctagatttctagcttcgaacaaaaaacaaaccactaataccctaaaactctataggactctagatacagctgatcaattccaacactgaaacaaaaagagtaaagaagccaaaggtgaaacctttttccaagttcttcacattttttgaagagagagtgatcctgatcttatgaatctgctccagaggagcctccaaaccagctttcgtgggcttcatcggttcatacgccatgttttgttacacctctttatcactctgcaaaagtcacatatataagaacagattcaatcaacacagaacaaatctcccaacacaacttcaacaaaagatcgtatttttatcatttatagttgccgattcatataacccacaaaaattaaggatccaaagagaaaaaaagatgaatatttaccgtttttaagccgggagaggattttttgcggttgtgaatttgtgtgcaactgcggaggaaggtggtgaagaaggaagaccttttattctctagggttttaattaaagttttcatttttgtttttacttgaaagcaacaaaaacggtgacgttttagttttggaccataatatttttctttgcgttgtttgggtttgtggaatctaggcctgtcaaaaacctgttatgttaggcccgctctatggtgtcgttgtacgtcttggttttatatagttaacaaaaacatccacttcaagtctccatctatgttttgtacaaatgatttcttgatacaaaaaggaatgggtactattcagaatatatattagtgggtgtaattcgtttttaggagggaaaactttcaaagttgtgggtaagaaaagagtcgtgctcgcgtcaaggagtttttttttcttccaataagaagtagatcatggcttgaaacataaaatgttgaatgaggttcacatttgtaggagaagatgaatgagagtaataccattttaatttcgataatcatcaaaatccatgaagaggtttgagtgaggaaaagctatgccttgagtaactgtggcagctaaggagatcttccataaaatttaagtctctctttagtgaaagtagcgagtcattttaattctgtctaattatcataccaacaacaaatagcaaacaaaaatagaaaaggccgagctcaaaaagcttcattatttgcttccaaatccaaacttaaattctataatttattgccaggaccggtcgaagttacttgatgtataaagcataccaaaaaaatgttgttccttatggcattatccatacttaattttttcttggacggaaaaagttaaaaattaatattgttatcaatttatcctacttcctacatgacgtatgtagttacctagtttaacattgacatgtgacaaagaatgcgatcttcttagtcaaaagaaaaagaaaaaataatgcgatcaatactcacgaccacgtgaatcggtggtagtggccttcatcctccaacagttctgacttatgtcatatatgaagtaacacaatatttatttttgctaataagtaataagtaacacaatatcatgtagaaaaagggtaataaagtgatattttagttaatttatagtcgactgaaattaaaatgagatataagaaaagagttgagttctgaatacatcaattacaaatctatatagcaagatatggtatgggccgtatagtaactttagtaaccccagaactttatggatcgcatttactcatcacatgcatataattattgttgccttctccatcaaatttcgatgtgccttattttctgaaaacatttctaatagactaatactgaagttcaataacacttcgagtcatgtaaaatacaaagtgaaacaagtaatatatacaaggaaaaaaaaaaagtgagttttttcttcaattgtctgactaaaataagagttgcaattggagatatagtaattttttactttatataaagtgagatatacttttaagataagagttgagttttttttttggtaatgagttgaattttaaatagaaccactacaaagtgatatatatgtcggccgccgtatcgtaagttcgtgaccccaaaaatttatggatcacaattgacgcatcacgtgcatatagctattgttggcttctttgcattttgacgtgcctttgcaagaaattgtaagagacgttttagataaagcgacaccaacaaaaatgaatattaaaattttaaaacccacttaagaaagcaatgctaatggcattaagatcgttttcaaattttataacgggatgtgaaactctgaataaatttgacgattgaaagatagcatattgagataagtttgaactcttaaatttgacggttgaaagaggattgaagtaagtgtgagttgtccaaaaaaaacggtaagtgtgaaactctttaaatttaaatattgaaaaagagcagtgagatatcagataagtgcatgtgaaaccaaatcccagctcccaaactaatgtattatagaccttttttctttcctttgaccaatatatatatgtgtgtgtatttatcttaattaagtagtttaacttgaaacaaaaatgtaatcataagattcattagtcgccaaatgaacaatttttttacatgttattttgttaacatcacctctattattctatgcttaatttttaacttaatctgtacatctttttgtcaataattaatgagatacatacattagggtttatcaaaaaaatatgagatacactagtcgcctaatttggttacatagcatatctttggacgtggatcagactaattagaagtgtacctattgttgcaattggaacgatttcagggtcaaatccactatccatctctttatgaatttcattaattagtcgcacaatccaatttctatcttttgttagttgccgggtgaatataaaatactttgatatattgacgtaaaggcaaaagatactttgcatgatagtacaaatatgtatccattacaaatatgatatatctatacgtatatttttttttttcaaacacataaagcgaataaaaatgaacattttgttaatttgtgactgatggtgatgctaaaatgtttcattcatattggaatggagatgtaaaataagtatacgttgaaatgccataattccttggaaatgaatcgatgataaagatcaacctgttttcattataacaacaatacaaaaggttaaaccatgttcacaccaaaagtccattctgatgatcatttacgaaaaatcctagatattcgtttgttattttgttcttttcattcccatgttactttttgggtcaagaagaagaaatgaatataattgccatagtacattcttaatacttaatagcagacaattctggttatttccaactaataatctagacctcagttggaaaaacaaataatcaaccaaagcgtcaaagtcaaagcatatcaattattctattattataaaccctaagaaaaaccaaacgtacaccaaagagtacgtactagtccactataaaaactcaaaaccaactctttacctctccacaaatattatctaaaccaaaacatttcaaaagaaatggcaaaacaaatattctacactctctttctattcctcttatccacggctattctcacggcgtcgtcctccgcccccagagccgcaataacttcaaaacgtgctataaacttcatacaagcctcttgcaaagccacaacatacccaaccgtatgcgtcaactctctcaccggttacgccaactccatccaaacaagccctcgacgtctagccgagaccgcactcaatgtgaccgtgactcaggcccagtccaccaaggtcttcgtctggcgcttggggcgtttcactagtctcaagaaacgagagattcaagccgttaaggactgcatcgaggagatccatgatgccgttgaccgtttgaccatgtcgatccatgaagtgaagatgtgtggtagtgctaaaggtcgtgaccagttttggttccacatgagcaatgctcaaacgtggaccagcgctgctttgactaatgcaaacacttgctccgatgggtttgcgggtcgggtcatggatgggcgggtaaagaactcagtaagggcacggatcttgaatttgggaagaggaactagtaacgctttagccttgatcaatgctttcgctaaaaaatactaaataatgtaatacattttctttttgttcttaattctgtaatttgagctacgaatgtgtggatcagctcgagggaaattttatttcttaaaatgtttcatgcataatccgatgtaattctggataaattttgattaaaaatgaatgtacaagtataacattgttaagttaatacgcgtttttctttttttgcgaccagcgatctaaaattgcgtttgcagagatttctagcagttagacgtataattaacgtactaattcactagaaatacaattaacgttagagtcgttgacgccgacacattcgttgaagtttggacggtgttgacttttgagtgtagatctcactctagaccatcacttactattataccccttcttaagtttagaaagtcctcaacctaaccttaatcttctcacatagataggcacatgtctctcctggaccaccgccctaccgtataacgccatctctccatagataggccgttgttgtctcagaagctatgtcctcatttgtcaaccaaaaaaattgcgtttaaagattaatcacatttaaattttatgatgttattagttgtagaatgtcaagaggtttcaactatagtgaaaatactttctgtaaaaaaaaatctatttaaaattgaatttgtttaaatttatccatgttactatacatgaaagaattactttttctgagatgcatactgaatgatttattatgtaaagtattttgttttccgtccattacatcatcatcacagatacttgatataatcatattacaaaatacaaatgacgatcaacccatcgatcaatctagaaaaacggcgaaattgaagaatgctaaattgatcaaaggataaacttttgggcttaaataaagttttgctgaaaatatttcgggcttatatagggctggccctattagactacaacttttttttttcttctttgacagtaaacgacgacgtctccctttttttctttcttcgatctccttctgccaaacactctcttcttcttcttcttcaatcttctttcttcgatctcttctttttcaaaatctcttctttgattgtgagaagccataagtaaaggttcgatttctctctatatgtctttcatctttctcatttttatattctcatagattgatagattctctatctttggaatctgattcataggattggggtttaatggttttcgaagaaatctgggttaaagtgtgttcgtgtgttctctaaatttgattcactaaacgtgtgttcgtgtgttctctaaattgaattctgtgtagctatgaacttgtgagtcgctgtaaaattggatttgaacttgtgggtcgattcatgttttctttcacatttggggaatcagattcttcttttgggtctgtttttgtatgttgaagtgtcgattttctattagtagttcatacattcagacatgttatgtatgtgaagtatcgagtttcaatttgctgaggattgcttgagaatttggcctctgttgcttccgtttatatcggtgtttttgggtttctatatcattgattctgcaacacattgaacaagaccagagactacatataaatgtctttttggttggatatgtttctgtttgaatttgtatgtttatagttttgactatagactgatctttatagctcaccaagaaaaaacaataaggaagggacgaaatttgtgtcaagataattgcagacgactctcctctgtctctcttttcattaacagctttttagttttgaaatatggctggaactttggtaaattagttgtatatgtctttttggtccagagtagtatgatagtgtgtatatgtttactcattagtgagtctgtgattaaattagttgactgaccaattaaattcaacttatttgatgtcttttataccgtacttcttgaatgaatcagctttgacattctttacaattccttgtgttttgccttaagttttgcacataaattatgcctcatgattttggttgaaaatgcaggtgattgaaatctataataggagctgccattgtgtgttgaatgggtatcaagttcttcttctaagtgatccaaatcctgcttccgattagctcaaatacttggtaataatttcttctcttttcgcagtttctaagtgacccttttatacatttcgcactttacataattcgtctgctttctctttacctcacagacacaaagagttcctgcaaaaagagctcaaagagtttctctttacataatccggtgatgtactgtctttctttcctgtatcagttccaactctttggtaagatttttctcttgatttttagtttgtttctgaaacaaattaggttatgtgtctgagttggtttctagggaaaatctatttgctttatatgttaagtcatcatcatatattcttttgcagacacttatgtctgcactggatttattgatattgaagctccataagcacgaattgatgatattcctggctttgtttattggaaatcgagttggttatgttaactttaggagagcttggatgcattagcactgtgactatctctgtagtatagtctctgtttgaatctggaagttgagtaggtgaaattatttagttcagctatagaaacaaaaatgaattgttgacattgatagttgagactgttactacggcacaaagcactgattagagcctgtcaatagaaactagtttgattcttggggttggtccaccacgctggatcctgactcatactgcatctgtattgctacacttgtactcttttcgagctagaattgaagctgttcttaggttgagtattgagtagatgataatttagagaacttgagatgtatgatatgtcactctcattggcttcaaagttggagctgcctacttgaatttgggtgttccttgtttcagttagtatttgcagtacgtttcttcttcttgagttaagattcttggattgttacttctcatgaatactctacttgtgattgaaattgttgtctttgttggcgtatagtttacttgtatttgcagttttggttttatcttgtggagtcctatattgggttgatatgaacttgttgcttatctttatgcatttaaaagtaaaccttttctatctgaaaccgcaggtatttcaagtgtagtgtctgatcttaaccatagaaccttctttgaattggcatgatccatacattgtgaaaagtaaattatgaagatttgtcaactatctgaaaatacaaaccaatgcttaattattaagatccataatgttgattgttattatgctttggttcttatataaaatttttttcatgaaaatggaagtttaaacaatgtgttataggcacaactatggcctagttgtggatttaacgagtgcacttacctttatcattgccgttaaatttgttattatatgaaagaaaactcaaaataataatgtcttatactaaactgataaaaaaacatttggtatgggtttgtgacagaatggatcaaatccctcatcgttgatcacgcagataatgttatgtataatagatttttcttattgggcctatatgggcttcttctttatgtctcatgagcccaaataacattgcataacttttaaaactttcttttcttcgtttgcacagattaggcaaatcgattctctcaatggctctttcatttcgaatttcttcgtcgtctccgttaatctgcagagccactctctcaaacggcgacaacagtcgtaactaccacacgactgatgccgcttttatccgacgcgccgccgatttgtccgaaatgtccgccggacttacttcacctcaccctaatttcggctgtgtaatcgccacttcttccggtaaagtcgccggagaaggatatctatacgctcaaggtactaaaccggcggaagcgttggctgttgaagctgccggagagttttctagaggcgccactgcttatttaaacatggagcctggtgattgtcatggtgaccacactgctgtatctgctcttgttcaggtttttgcttctttctcttagatttttctgtgaataagccataagccaatgattgtgtgatattaggaaacaatttgaccaaattgagattgtatagattaggcaggaattgaacgagttgttgttggaataaggcatcctttgcaacatcttagaggctctgcgattcgtgaattaagaagtcatggtatcgaagttaatgttcttggagaagactttgagagtaaagttcttgaggtatctatgtcttcttactcttcaatttgaagttaattgttaggattctgttaactaaatgttcaagttcttataggatgctcggaaatcgtgtcttcttgtgaatgctcctttgattcatagagcttgttctcgagttccgttctctgttcttaagtatgccatgactcttgatggtaactatttcaacctccatttcatatgtttgtaggatagctgttttagctaacgttttttttgtttattgataggtaagattgcagcgagtagtggacatgcagcatggataagtagtaaactctctagaacccgagtgttcgagttgcgaggaggaagtgatgctgtgatagttggaggaaacacagtacgccaagatggtaaatattgtatcttaaatctcgcatctttacggatgcttacaacatattgaatagatatgtgaaagttgtgcaattttgtaactgcagatcctcgattgactgcaagacacggacagggtcacacccctacacgaattgtgatgactcagagtcttgatcttcctgagaaagctaatctatgggatgtctcggaagtatctaccatagttgttacccaaaggggtgcaagaaagagtttccagaaattgcttgcgtccaagggtgttgaagttgtggagtttgacatgttgaatccaagagaagttatggaatatttccatctccgtggatatctttctatactatgggagtgtgggggaacattagctgcatctgctatatcatccagtgtcatccacaaggtacccattatactatatccatacttatttgtagtcatcttatgtttttgtctggctaaacctcattttcttacacttctttctctcaatgtaattcatttttcaggttgttgctttcgttgctccaaaaattatcggtgggagtaaagcaccttcccctgtgggtgaccttgggatggtagagatgacacaagcattgaatttaattgatgtttgttatgagcaggtaatttttttgctttatgaattaacattcactgtgacaagttaaccatgttactgaatctggcctcttagttccgtgggtttaatctaaatccttgaactacaggttggtcccgacatgcttgtcagcggatttcttcagcccataccagacctcttacctgttatcccatcagaggatgcaactgtcgagattgaccccagtgttgacccctttgaacctagtatcatattcttctacaaaacatgggacctctatggaagtttctcaaatttttctccacatccaattcgaatgccctatggcgaggagaatgatgattacatgacctggtccagtgtggaacattactatcaggtaccacacaacagtccatgtaaaatggtatcttgctctttcaaaaaaacataatctcttgatccttcacccaaaaactttaaaggcaaacaagtttgttggggtcgaaaatccaaaggcatatgattgcgttgagaaaattagaacagctagaagtccagaggaggcagctctgataggcagatcaacactgagacagaaacctgaactggtatgaataaaagttgaattgtccagtttcgagcatcaaagcagttttcactcgtttgttgatctctcgagaatcgagatcgttattcaggggatcaataatactgcattctcgctttaatgattgttttaggttcggaatgattgggaagatgtgaagatagaagtaatgtacaaggctttaaaatgcaagttctcaacttatcctcacttgaaatcaatgttgctctcgacaattggaacagttctcgtggaggcttcaccgcacgatctattctggggaggtggccgtgaaggagaagggcttaactatcttggtcgactgcttatgcagcttcgttctgagtatctgggcgaatcctctgtttcagctgaaaagacttcttcggcctgatggatgatgatagtctttcatatttattccaaaaagttatcaataaaactttcagttttcctcaattttgacatttacattgttgtaattctttaacctatataacattattgtaagtttgtaacattatgatagttttcctagaccatttgattcacattaactcatactgagtattttaaatggtaacggtagagtttttatttgctttgttcggttttaaaaccaatccaacatattcaagaatccaattcgatttggtccggatcagtgaaaattccaaggcttataggaacacctttcgtaaagaagacactaggtggtcgcaacttttcgagaagaacagacactaggtggtcacgaagacactagctggtgacaacgtcagaaaatactcaacataaaagtaaaactcttaaaagagttacataacacaaatattaaaatatgtatcatataatcatcatagtaacataaacaaggattgttgtaagagtttgcgtatgcttgaaactacaagagtagaaactgagctaaaagcacatggaaggttactttaacattggaaaaacacatctttcttcttcttcctttcaagtcacttttcctcttcttttctttcattttgacatttctttcttaatactttttaaatatgtaatggaatcaattatagacctttatataggtgtttgatattatatgattttataatcataggttgctaaataagaatgtaagtcatgatatcatatgaatacaatcccaagcaaagacaacacacatcatcatgttctcccctcaataacaatcacttgcaaagtacatacacacaaactcaaaataataattctagaaaacaattattaactaatttaatatacaaaactaaattccctttaattagttaagacatcacaccaagaaacttctcaattccccatacaaactcatacccaagaacttcaaaaaaatgcttagaggcatctttcacatttgcctcttggcctcatttcttcttctaccgttctcctccgccgtacatgatagtggcttcaccggtggtaccgatgctcctcctccgtgggaccataatgtttccccaccaccagaaaccgcaccatccccaacccccacctcgagtccctctacaacctcaccgccatctcctggaccggtggctgcgccatctccgatcaacaacggctctgtctccggggacatgacatggtggtgcaacaagactccacacgctgagacatgcaattactacttccggaagagctcacaaaacaacattaacctacgaccaccaaggttccggtccgagttcttacggatgctggtcaaggtagcacttgaccaagccgtgatcacacacagtcaaaccgttaagtttggaccgagctgcaccaacaaccaaaggaaagccgcttggtcagactgcgtaaatctcttccaaaacacggtggctcagctgaaccgaacgctcaagggacttaacccggcggcttcgagtgatgtcaaatgtacggacttcgacgcacaaacgtggctcagcacggctcagaccaacatcgagacgtgccgttccggatccgaggatcttaacgtctcggatttcgtcatgccggtgatatccaacaagaacttgtcggatttgattggaaactgcttggccgtcaatggagttctcatgaagcaacatgatcatacgactactggtacgttctatgaatattataattactttgagtcaaagcaaaaaattatcaaaattacttcaattaattagattcctcatttacgaatatgcatgccaatttgttcaaattaatcgttttctgcttataagttgtctcgtaataaatttattttgatacaacaattataagtaaattaaactgttacgtttaacgtaatctttgttcacacgtaatcagattaatcatgcatgaatactaatttacaccttaggctataaaattttattttcctccaaaatacacctttttcatgttagacggtatattaatttgagctgaatacggttaatatgtaacatgactttatctaacacggccaaattccaatttgtttggtttgtcaagctaaccacaaagaatacttcccaagctgggtttcaagacatgagagacgattactcgtatcagcctctttagcgaaatcgagtccccacctagtggtggcacaagacaggtccggccatttccggtcgatccaagctgccataaacttcgcagcgagaaggagattcaagtcaagatttgtgatatatgtgaagaaaggtgtttaccgagagaacattgatgtcggcaatgataaccacaacatcatgctcgtcggagatggcgagagaaaaacaatcatcacaagtggccgaagcgtccagcatggctacaccacctataactctgcaaccggcggttaaaactctatcttaaaatcttggctaaatccaactttaagacttctaatggtactaataagtcttttttcccaactcttttgaaggctttggaggccaaaggtttgtagcaaaagacatgacattcatcaacacggccgggccattacgtgggcaagctgttgcggttcgatcatcctctgacctctctgttttctaccgtgtcggtatccatggattccaagacaccctctacatccattcacaacgccagttctttagggaatgttatatctcaggcaccatcgacttcatcttcggaaatgcagctgttgtcttccagaactgcatgattctcgtccggcgccctcttcatggccaagccaacatcataacagctcaaggtcgtggtgacccttttcagaacacaggaataacaatccatagctcaaggataattgcagcttctgatttgaagcctgtgatccgagcttacaagacctatttaggccgaccgtggcaagcttattcacgcgtcacaatcatgaagacctatatagataactcgatcagccccttgggatggtctccttggttaagaggatccaattttgctcttaatacagttttctatggagagtataaaaattttggaccggggtcttccacaagatggcgggtccggtggaaaggattccacgccataacgagcaccgcggttgcttctcggtttacggttggaagccttatagccggcggttcatggttgccagccactggcgtgcctttcaagtcagggttgtgaggagagtcagcatgtcctatattaaagactaaacaatgtgtaatgtgtgtatgtgatccttgttttatttattactgatttatttatcacctttttatattgttttcaacaaacaaacaaaaaaatcattctaattatagagacagtggtacatatctggtatactatacacttggtcctccttgaaatctgaaacagaagctttgatcaatgttacaaaattttcactgaatgttagtggactacaagaaaatagtttgaaaattggtaaagagtaaaggaaaacatattcaaaggattagacttgtaactggtgtactctagattctagttatgtttcgaagcctaattaggtttctatgaattttcttagggcgacaatcatcatggtttgagaagattagttatcattcatctccaaatggttgataaattcatgtggcaacttggaagagtaaattcaattcttttcctatttgttgtgaacatctacaccaaaaaactacacagtcaaagtcaggtgatacgtaatacgtttaccatcttctctacacataagatatggtgaagcaatcaactaaacatggttaattttcattcaaaaaaaaaaaaaaaaaaaaaactagacatggttgaagaaacctaaaaatcaaaccaaaaaatattgaatgtgcatccttactaccttaagatatattttcgagattatgctctgcttttgttttatcaattagaaatcttaaggttattaaagaaggattatactcagaattagtaacaatgaaaaactgcaaataatctatatatattttcttgggaaagaatgaaagtttgattaaccaaaaataaataaaaagaatacaacttagagtctttaagtagagtgaaaacgaaacaaataatcatttaagtaggggtaaggaaatatttatcctcctccatgatatcaccaatataaccaactaaactcatcacacacccaactaaaccaattaaaccgaaacaaaccaatgccctaaaaccaacacaacccttctctttcacttcactaaccatcacatcttccttaaccgtcgccaccgccggaatcgtaacctctcccttctccgatgatgatgacgcttcttggaacaatggccactgctcagcctctacttcttcctccttctcttcttcttcttctgctttacactcgattagacaagattcgaccaaagagtaatcctcaccggttttaccgttgataatacaagcattagtttccaaactttccatttccggtttgatcaataaaccattaccatgaccgggcaattggttggtgataaaagcctccatttcgaataacctctctgccatgcaacgcagtttatacaactcttcaatgtcttcttctccttccacatcctttggccgggacgatgtctcagccgttagaagggtcttcgcgaatgtgattccgagttgcatttttcgaacattgggatcattatagtcaaaagtgattacttcaagaagagactcgagttcttcaagtttcttctccaacactgagttgatctttgccttcattctcttgatcccaataatgtttttttttttttttctcttcgtcgtattttacaatgtcgaaacagtgtaatacaaaaacttctaatgtagtgggttgcgacggttatcatgttcatgaatgtgtcttttcgtgcacacgttcatatacgttacctaaaaatgtgttccattggatgtttttttttaatagattttctccttaacctttttcctctcttctagattttttataattaattagaataaatagatgctcaaaaagagaaagcatagattaaaagaaagttttgcaagggaaaaataggataaaaataccaattgagaaatctaaatatactaaatcagcagtcacttttccaataactgatgcatttagtgattgacacatcagtttattactatttttttattctttcattttcacgcaggatttttatgtgtcgtttttagttaactttgtttctttctcaaacgattttctctttcatccccacgatctccacatctccactttctctcttccaaaaactccatgactactgtgtaaaatctcaaagatgggtttctcaacatcattaatcgattactcagaaatcaggtactttgttcatctcaatgaaccaatttcttttttcttcctgacaaagacgaaacgcaccctaagagctctatcttgcattagggaaatcgtattcgtgaataaatcccctttgttaaccatcttctatttctgtttgtaattttgttttatatatatagaattctccatagatccgaaaatcatatatccttcttctagatttctatggctttttttttttttttttttctttgtttctgctttatttgactgaattcgatttctctcatacatctccttttttccataggattattctttaatacaatcaatgcctatgattctccgtctcacaaacactcaaggaacaacgacaaattttggcttctcatctaaacagttgccttaaaacaagggtgagtttaatatcttaatcgaagctcaagtgtttttttaatggtaaattaattctcatactttttactattcttctttcatctcttattttacttctttatatctgcaatttcttttttgtattaaaccgcaattgtattttcacgcaagatttttgtattaatacaaatacttcaattttaaagtcatctcttattttacttctttatatctgcaatatctttgatattgtttcaaaggcagcgtctgcgtcatgtagttacttacttgtgcatattttacatttttttttagacttccaagctttgggtgtcaacgaatgtttgtaaactgaattactaatgatgagaagaaaaacacattacaattggttggagctaatgatgaaataagcggacatgtatatacccagcataattttcgtacttatactctcttatatttctaaactcttgatttgttagttactgtctatcgcaattgattctttgggtagaaaagttgtaccttctttatatatttttcttaatctttgtatattcttcagtcaatgataataaatttgttgtatatttatgctatctgctttattttaaaaatcttagttaagagttgtagcagatataatttaaaacaatgttgtccctgcatagcagggccaaatgctagtcagttagtatatttcaaaagttaatatcattttcttgtacttaacaaaatttattttgttccataatgaatgttctgtccaattttgtttttaaaacattttatgttttgtttttttaatacttcccatcggtttgatatttgaggcccaagtatgtggcgtttgaattaatggcttctctagtccattatgaaattaaggtcacaactcattttttaagaacaatttccaacccatttctccaaaaagagaagaaaaaaaaaatcataaattcaaattcggagttaagtttttcttcaattctactccattttgctgttgaaaaatgggtttaaattttagtgtaaatcgaaaataaaaaaaatctatataagatgaagatttctattttggaaattggaaatagagataggttggaaaaatctaactttaaaccatattttggagatgaatatggagatagttggagatggttttagcctcttaggctcttttattcttcaccaataattagagtctatgcttcttggtgagaaggcatgcttggaatatataaaaactgatatcgtggagttctcttatattttcctgtataaactatctgtggtccattggagttagagcaaatatatatatgcagtcgtactcattcggacgtatagattttgttttatcaatttttagttttatgatttcaaagaatttaacatgtagcctcaaataagtaatgctatataaaattcagatttgtacaccacaaaacaagtagtttagaaataactgtatctaaataatgtgataattatgcagcttctagtgggatccggttacttaatttgattcagtataaaccaacctatcattatcaattactccgttgtgtgtgcattttttttccctctgaatgtcaagaatgtggtcctccatatgtagaaggcactagatagtctatagtattatcttatattattattaaacaaatcactaatcaaatgtagtggtctacaatcaaatactggaaatcagaagttatggtccttaatcttagtgatagatttttacattagttaatgttcttaatttatgcttattcatattatacacacacacataagagggcttacactcgttctaatatatactaatgccatgactagaatatagcggaaggtaaaatgtatatttatgatttatgtgtatattctgcaaaaccaagccaagaaaatttggagggtttatttcttttgagaaattgatcaaatcgatatatagtaattatgtacaatgtacatcacaatacagattacatgtttacaaattcccacagacctaaactctggtccgaaatcttccctatgaaaaaataaacaaaacttaaaacgctactaaaaaaatggcgatcaaagttggtgatcacacttccatcacatgatcttggacatagtccaccggagatctacattcttccgatggcctagactcagctatcttctccgctacttcggccattaccagcctcgtcaacaatagtccagccacaaacgcagctcccatcaacattgtgaaaaccgcggtccagctacccctcgacgatatgtaacccgttagtaagggtccgaccgccgctccaacggatcccgttccatcgataatagccgttaccgtagccaaagctctcgagtttcctttcaacgagctgtgtgttccaagatcagctgaaactgccgttgtaatcaaagcgtaaggaccgttaaccaacatcccggtcaagaacatgagagacgcgttggctaataacgatacatgtccgtagctacggtagaagaacaaagctggaattgagcagtacatgaaactcgcagccgtaatagctcttgcaccaattcggtctgaaatgtaaccagccatgattccaccaaccacacctcctacatcgaacattgtcgaaagatttcccgctgtttcgtccgataaatattcgccttcaatcgctgcaaaatatcattcaaaaattgtaatcagtaacgcaaccaagacaagtaatctagtggtttgtactcactcagtaataatatacaaaaaaattacctgtatggctaacgtaaaatgggagccagtagaggaaagtgtaagcgaccaacttagcaaagaagagacagagcgcgaaaggcgcaactccgggaatcctccacgcttcaatgaatccaacagctcgtttcttgtcatcggtttccgaatccgacgagctcaatagtaacggctcattaacagagtttccgattttctcagacgaagaatcaagaacctcgtctcgctctgctccaacattctctggactaacaggcaagaaagcgtaattcaccaaaccaatcaccacaatgataacaccaggaacaacaaaagaccatccccaaccatatctcaacatagcagcagcgatcaacgagccagtaatgttcccaacagaagtatgagcattccatatccccatgatcaaacctctcttcttcttgttaaaccagtttccaacaacagcaacaaccgatggccaacccgaagattgaaacaaaccagctaacatttgcattatcaagaaatagtaaaagctatgaatgttaccccaataaccaactccaaacagagaagtaaacaatccagttcctatcattccaacagtcaagaagatcctaagattcatcctatcccccaaatgtccagcgaaatacattccgaaagcgtaaaccgcaagaaacgcaacatcgatctcaccgagcaaaaccgtaccatcaggaccattgaaaggagcccaaccaccttcttcttttacagaggaaccaaacgaagtaaatctcaaaagaagtgagtttagtcctgtatctggagattgaggatcaagagcacttttgacaatacttgttgtttttcttgcagcgtgatagctagcgtaagcgagaaacgtcacgatcaacactatggcttgataagcactgtaagagagctttgagcctttgatacgttccaagaatcgtatccctatcggttttttctccatctctggttcagattgcattagagaacccatcaaaacttgttcttcagttctcgaaatccaatgttttgtttgacctaaagattggagaaataaatattagataaaaaaaaagtatcaaaaaagagtatattcgaatatttcatatagaattttacttttttaactcttggcgttacataaaggttacatctagtgaggaatctctagaaacgtgtcggaatgagtgacagatcgtgattttgtacttgtgtctcttttatgaactctcaagagaaactatttgaagtgttttgattagttaaataactcagattttattaccttaatttatttatttttactctagatattctttacctttatatgagttatgagttatgaccactaaattggtatatttaaggaatattctttaaacaaaaaaaataacagagcttgaaaattcatcaaatccttaaacagtttactcatgacctgatccaagttcatcttgataatatttgttgaaatcatgcaagaaaataaaactcatcctttgaaatattcaaaattatattaaatacagattataaaacagaacaggatcaacttaagattcgaatctcgaagaatgctaagaatataaaagaaccatcgggggacgatgaagaaagatatagaacgatgaagacgcatatcacgatttgaagaattccttcgtaaaatctgtaataattactagaatattccattggacagaacaaaaatctctgagaaaatagaagataacttgataccaaagatttgactcaaaaccagaaacattccaagttcacttcaaagataaacagtaacaacacaacaaaaactttaaaacgaaaaataagttgaattagtacctttagcaaaaataacgcttcctccaaaagaaattcttcgacgagatttttgactctaaatactgagtactgacgattgagaaaatgataaaaatttggaaaaaattgatgtttttcttttgctttgaagatgcaaaagatacttggacacgttttaggagcttgaagcaacggcgacgagtttatagcatttgtgctcaatagtcgacccaattagaaaattgtttttttttatattataaatctgaaattacgatctcacccttctatcaacaaatcatattcgtcagatatggaattacagttttaaccttgctagttgcgtctctagttgtcaaaccacgccaatgaacgaagtcgaacgatggttatttcctacgtaatatacctaattatataatatgcatttttaaatattagtttgctagattctttttttcttaatttactaaatacttgttgaaatgttctagatatacaattcatgtatgacttttaacattatgcatactagatctttcttatgctcattaaaaactaaatctttacattttctagaattactaaactgacaaatatatttttctttttcttttatattttataaacttgaagctggaaataaatatagcattctactatatgtttttcaaaatttaaattttccatttcttttatttctttttttaatattttgtaaatactatttttgaaccaaaaaacttgtttttttgagaactgtacactaaaactgttgagaattggttcagtttgatattcaaatattttaattggtgtactaataattcagggtcaagaataatttagaatttatgcgtggtctacgttacacgatgatttttagtggatgataaataataaaagaaagaggtaacaaatgcacctaaccatttgttttaccgtatataaaaaatttcgaacttcatgataaaaaccggcatgcaaagacagttaaaaaaattttatatacggtaaaacaaatggttaggtgccttttatgcaaatacttttgtacgaatgcaaaaatatctttaacaaaaacaaaaaaaaggactgtaaatattttggatacgtggtcctcacctcaacctcggccacatctactaatttgtactctatttagtgtttttttgtatactgtattatactaaagtcattcctagggatttgttatcgtaaacaataaaattgttttgggaacttgaggacatagtagttgatacaagtggtttggaacaaaagaagaaaacaaacactttgtaaattcaatcttattggctagagcttaggtgttaatttgggttgaatttttatgaacccaattatgtgttattggcaaatgtggattccaaatatcaatccatatattaagcatgtttagataatcaacttcgatgggttcactagttagatgggtcaactttcataatcaactttcacaagttttagtttttttttttttttttaatatatatttctatatgtattgtgtaatgtgtaaactacacctttccccctttcgtgtagtattcaagtccttttcttcttatgtgatatgtgacaacaaacttttagtattctcatttggattattggatttggtagtcccaaaactgaagaaaatcataatcagaaattaatgagtactgttcgtgcatgaattgggtttcgcattcttcacgtgctttagagtatttaagggaaataacaattggaaactaaataaacaaccaccacagaaaaaatgttcagtatcatttgggatccggggtatacaatttgaagaccccacaacgctcagatcagaaagggctctgaaagaaattaagttttggaaacaactacattacataaagtaatatgtggatgtggtgtggtgaatgcaagtttctcatggattagcgcatggggctttcacattttgtcatcaataattcttattattaatttgatcaatgtggttgataaaatatttgtcaacgtggatagtacataatttgcctctacggtcaaagtagatatacgattttagaaaaataaaagtatttgtatgagtatatatgtcaatgtttaggtcgttatcaccgattattaatacgggaccgcgtagatacgttaaaatcttttccactgtctatttggtcggcatttaattatcaagtgtgagatcttgttttaggtaaaaaaatatgacgataactaaagtttgtgtcgacgttttttttaaaaaaactacattatttacgatggttatatggaagtctcaaactaaaagctaagacaaattggttgggccaaaaaattattttagtaatttttttatattctcttatatctcaaattcgagccaaatgattagcatgtgttttctttacatacctttaatgctttcgaaatgtaaaatttcagtgatatttttttggtgagtttttttcctctagtaaagagaaactctttcgatagaaaaactctaagctagttaaaatacgaagcacttattttaatgtccaaaggctattcattcttctcctgtttaaatgctttgttttcttgtctaaatcttatacgtgcacataacaacactttgttcaattacctatatatgcgcattaatgcttgtttcacaaaagaaacatagtttggtttattatgccttgacggtcgtactcgtattttcaatacttattttgaatatagtaatagaacttgcgtatcggcgaaaaccaaggaggaaagcgctaccatgttcggtgacgaaccattattctagactctgcctttaaatttcttatacacaagaaaagaaaatcttttttttgtcttagctcatccgatccctttcggttacttgattcaattgtaggattttcgttctataaaaaaatatattaccgttttggtaatatgtagcctattgtatatatatatatatatctataaaaaaaatttgtgttactatctaaattcaaatctggtagaaaaagtatatatacatatatatatatagttattgtgttaatactattttcatataagtatatttcttagtttttgttaaaatttatgaaaagtttttttcgtgatcaaaagtggcttagagtaaatcacattttaacaatgaaaacatcaattaatcatttaaattaagagtgtccattgaatacgtttccaatagtaaaaatacctgatcattcacaaattatcagtggcggacaaataatctaaatatttagtttgaactttgatgtaagaggtctttatcaaagaaaaaactttaatgtacgtctgttataaaacaatgggaattcaaattggaaaaatattatccctaaaagttttgatgaatatatataagttacttttagaatatggatatggtaggatgtgatcatcgcatgatgtactgggagctgcaaaacgccatccaaaccagcactcatgggcatggccgcccacgtgccacgccgttcttcaactctgacgactctgaaacttctcaaaatcatggaactacacaaagttggtgtgataagggcattttagtcaacacaacgagttctcatcttggcccacacacattacctcagaagttttggaaaacataagaagggtagttacgtaagtttagaggtcattatggagggaaatggcatattcgcatataccgaaggattatacttaacgtgcagtggatattctatcaacttgtccgggcccatattggggcccatttggtgccacgttttttgtacggaaccgcccgacgtggtaataattgtggatgttgttctttaacaggatcgatcctttgatgacgaggcgaccaattgtcttgaattgattctagccttgggttcgaaccgacgtggtgttatttgattattatatttggtttcagtgtcatacactctacacgagcctccatttcaaatttaataacaaatctttgttaggtcatattgtctagctaatataacaatgcgactagcagaatgtatgtactacataatcagattttatatattcttgataatctcttacagattttttataacaactgattatatgtaatatatgagtttagtgtcaaagaaaattatgataatatttttagaatcttgaaaaattaataacaagttatttacgtatggctgtggctgcttcattagtcattacgttagtcttttgaaattttcatgaccacaagaaaatatttcttccggttttgagatttttcgtaacaaacaaaattgaataatcgatgtacatcactaacttctacgtggcttgtgaccaagacaaatgactgtataaagaaaagaagtcgtcgttagggggaactcattttttatatttctagggctgatatttgatttgacaaaaaatattgtccaattatatgaaaaagtattacttaacaattcttctaaccattataatgaaaacatttctagggctgatattttagttttttgtaagaaaatcatgaaatgcattttgttttgtttgttttattacatgggccaagatatgaactctcaatttccaaatacagagacagctgaagatcaaaggataaggagtattttctttttctgtatacgtttcttggtttcatatgaacaaaattgattatgagaaaaagaaacaaccattagaaatatttattttatctagctatcttcaattattttgcctaacttgatgtgtcctttaggctttaaaaaaaaaacttgatgtgtccttttaagtgacacatcaatgaaccatatgtatagtctcttgttgttttataaagatcgattgaatttgattttcctctctatctatacgtttttgtttgtttaaaaatgtcaaaaatttgggtatccaggatgttcgaacgcaggacacgtatgaagtgacgtctttcaccgccgtaaatctttggattgacagtccggtaaaaacagattaatagcttgatagtccaaaacgcacgtataaaagtttttgcatgttgaaaatattcgtatccacacaacattagagatcaatcatgaaaccgatatattgaaggtcacccgacgtcaaatttcccctgaaagggacacctcaaaattacgtggttcgtgtaatcttttttcctttaagatagggatcggattatgcagtataaaattaagcaaatcgtatttggtgatatatcggttctaatgcataacatcttttatattcacacaatgaaatagctatttgttttcagtttcgagctaaagcccaagctccagcccaaatcaaacccatttgtacaaagaacctcactcatctatttgtgcacaaattctcggatttctccaacgctctcaatcattttataaaaattagaattatcttcaatctcgatatacgaacctaaataattgaaaacattttttttctttttatgtatttttcttttttatcaaatttctttttatgtatataaaatatttgtgaaagtttcttccacacatataaaagattaaatttctttttttatcccaagcttgaatatcaaaacatgagacaacaagagcaagtattagccaccacaaagcaatcatcttaaaactcaaaccccaaaacaaacaaaagacaaaacccgattgtttcgagcacaaacgtcacttgtggtttacatcgtcttcatcatctccataacttcatatctcctctccttccgctgccaccgttagcgatgtctttggacactgtggacaaactggtggtgttcttggccaagagagacggaatagacaagcttgtgaagacattccaatacgtggccaagctcgcgtgctggcatgttgaagccacacgacccgaagccgccgataggttcaagaagtgggaggtcgcctccggtctcagccgcaaagccttcaggtcccacatctttttaatattaatcactttatcgacaaagtggcatcatcgtaaatatagtttaatagatgaaatgaaatgaaatgttttagtcacttcttgattaatatcttatctcatctagcatatttgaatagtgactagtacgatacactttatattacaagaaaaatataattgaatagtgattatggtcgaattatgcgaacaggaccgggagatctctcacggggttcaatgcgctgagacgaaaccccggggcaaccccgatgatccgtttcttggcggtcctagccaattcaggggaaatggtttacttcttctttgatcattttctttggttatcaagaattggttcaatagacgccaagctcgccaagaaaatgagtttcatatccgcttttggcgaatctttcggctacactttcttcatcatcattgattgcatcttcataaagcaaagactcaaatccttaaaaaagctccagcattcgaccgatgaaccgaaagaagaaatcggcgccaaaattagcgagattcggggagatatagtaatgaggttgatgggaatttcagccaacgttgcggatttacttatagcattggcagaaattcacccaaaccccttttgtaaccacaccattacactcggtataagcggtttagtttcagcttgggccggttggtataggaactggccatcgtgagatgtaataaaatcaaatgtttgttgttttgaatgaacgtatcaaacgtgtaatgtaactcacttgaatatatgaaacatttctattttacattatctatagtcaaatcgaaatcaaacaaaactaagggtatacaaaagtataatccacatacgtgggggacatttatgaaattcataaaacttggtaactgtaaaatagtaacttcccactctctcaccctcttcactgggacggttatttttttttttaaattcatttgcatcaaaagtcgttaccttccagtaatatttatagatttataacgatgcaatactcactaaagaaacagaaacagagataattttttcgaaagaaattgatgagaagaatgattccaacatcgttttcaagtaagtttcaaggagtactaagtatgaatgcgttgagatgttatgtatcagagtttatctcaaccttcttcttcgtcctcgcagccgttggttctgtcatgtcttcaagtaattactctgtttcttgatgagtttgatccttttttgcaataagaagaaattgttaacctgtgttttttcttatcagggaaattgatggctggtgatgtgtctggtccgtttggtgttttaataccggcgattgctaatgcgttggcgttatcatcgtcagtttacatctcttggaacgtctctggtggtcatgtgaatccagcggttacgtttgcgatggctgttgctggtcggattagcgttccaaccgctatgttttattggacttctcagatgattgcctctgttatggcttgccttgttcttaaagtaaccgtcatggaacaggtaatcaaacatatttactttttgtctgattttgtgtgcttcgttttgtttggttattctgattagtgtgtttgaatttatcagcacgtaccgatttataagattgctggagaaatgactggatttggagcatctgttcttgaaggtgttttagctttcgtcttggtttatactgtgttcacggctagcgatcccagacgtgggctacctttagcagtgggacctatatttatagggtttgttgcgggagccaatgttctagccgctggtccattctctggaggttcaatgaatcctgcgtgtgcctttgggtcggcgatggtttacggaagctttaagaaccaagctgtgtattgggttgggcctctgcttggaggagccacagctgctttagtgtatgataacgtggtggtccctgtagaagatgatcgtggttcatctactggtgatgccattggtgtgtaatgacttgtttatactgtttcatttgttgaattgttgatgtagatcttttttaattttcagtttctgaaatgttgttgactagatgtttaattccttgaatgctatgttacttaagtagatttcattacaaacaatttactattttgttacatataactctggtttgtgatactaagccgatatttttgcatctaaacaaaaaaaaattcaaaagtaccatttgggtcttacttcttcttccttatcggttaactcacgatactgataccattcagtacctgaagtaccaattggcaatgttggtcgaagaaaaacttcaactggttttggcacactgacacaaatatgtatctcatgctctgcttcattgagatctctcggttcagttcctcgtgttttgcggattggttcaattgaaatccatcctaaccctgatattgccacatcactagccggtctgatcaagaggtgtgttaacgttaggtgaggatcatttgttttactaaacatagatgggaatggaagatatatatttcacctttttgcatcgttgatttcgatttgaagtaaccggtgagattgtaaccctttccactcctgcatctgatttttccctgatggaggtgttagaagcacacccagttctttctgcagaacaaatgagtatcaagtaaatggtaataagaagatttaacttgtccttgaataagtaacgaagttgaaaatgatggggaacggaacttgcctcgtaaaaggcagtcgctgttttggttggtactgcatgaatctcaagagcttttggtccatagaatgtgaaacatgtttccggtagagcctgcaatatgtcaagtatgttaaaaaattctgatatccactgtgaaactgaaacataattctagtaataatagttattaccttcaagatgtcaatcctaacgagacctccccagaaaaatgtataaccgtttaagctctcacccttgggactacttgacgattgagttggcaaagttgaaatctgtaaggaacaaaaagcacaggaagatcatcacactggtgttacggtaaaataatctttacctggccgtaataaagcagacttacatcgaaagattggcctctgagacgattttgaggagcaagggcgggtaaatcatctgaatgaacgacagctgcttgcctgtggtgtaggtgcacacccggtgtgtcatacaacttctgtggtaataatgtattcttttagcagaatgtctactattgcaatttttggaaagttctagaatctgatcttggtttaagtttatacctctcctccgacgaaagcgttgatctgaattggacccaaggtggttccagggacagcagattgaattggtttgtacttttgtgccgctgctgcaacaggatccctttcggccatcgtttctgtatggtgaagtacatatacaatcattcaaactctctttataaattgtggagaaattggccatactagagatcaggctaaagcagcacccagaccatattcaagcagatacaaacttcaacaacaagtgacacaaacacaatggagaacaaatgacttactcagcaaagcattgatgaatgctgacttccctacgttagctgcaccctgtgaaagtatgaagaaataataaatgaatattttctaaaccgtcaaagaagtttctttataaatgcatagcctctatctccagtaaacgaatttatgaattagtggatcatatcgagcagtgttgtgtcgagtttgttgttctgatggacatccgagaaaattgattttcactaagcactgcctctatcatttaaagtgtgttaagctattaagtaaatagtaagaactcgcatcagttagcaataggtttacaaactaaaactctattttgttggtgacaaaattacgaatgcacataccagaatgtagacatctcgtccctgaaacaaaaacagggatacagaggtcaggttacagaaggtaaataaagagaaggttatattgtccgacactgagccataatggaaacaaaatgtacgctaaagaaaacagctttaaggtggtgcaatatataaaaaaaacgctacctttttctccttctggatctctgatgcaactccgctaactccatccagggactttgaacttgtgagatggacactcaagacactgaaaagttatatcacacccaaatcaaacactagctccagaaacattacatcactttctagcaacaaccatagtagataagtacttgatacctacttaagctttttcctcatggtcacttccacaacccaatccccgatacaattcatatccgttccttttggaagaagatcaatctaacaatacaaaacacaattatttaccatagttagaaagaattgaagaagtagccatgttataaaaccttaccttagttataacaagtataatcggattagctccaactaaatcacgaacacgagctaaaaagcttccattaaaatccactatatcaacctgcaacacaacaagttgacgatctcttggaacataaaacagaaaagagaagttcattctaacaatatctactcaccaatttaacaatcaaagctttctcatggcgtaaatgagaaagtttctcacgaagttcatcagctgatacaaattgtttcccacctggataacctccattaccaccaactgctgtaatcatatgtccatgtgacaatagctgacatcttccacatatcatagttcttaactggtgatgcttcttcttctacaataaacacagaagaaaccatctctaattcatcaatcaactaactcaaaattgagattctcaagctcgaattcataccaattcataagtaaccaaatcgacaaatcccggagaatcgacgtcggaagtttgtaacggagctccgcagccgtaacaacatgagactgaggtatcaacaactttccgtgcaataatctcctctttctttttcttcttctcctttttgatctctttcttcactactttctgagcttcatgagctcgttggttctccaggaacctttctccaggggttggagcagccgccgcaaatccatctcgttccgagagtgaaactggtggttctgaattagctattgatttacagacgattgatgtcgtcggattacggtaaatgacggtgagattgggttcacgtctcgtcgttgtgtggcgacgaggaagagaaggaaacgttgagagtgttcgtagcgccattgctgagatttttcctcaccagctgttgtttgttgttatgttatctattaaacccagagagagaacaagagagactctaactggtacagaggttttactcgaaagaagaacctctggttgattggagacggttatatccgcccgggacaaaataaccggaatcgaatacccgaaatgaaccgatccaaaattagggtatagattagaaattcagtttcccgctcttttgctaccaaatctcagaaggcccaattttaaagagaaaattatgtttttttatttggtaaattgaaaaaaagaaaaaagaaaaattcaaatttgcttgtaataatcctctcaaagagaattcagttagacgattcgtctctacttctcctgcaacggttagattttgaatctacgctctcaatttcggaagcttgttgtgatacttccgtctgggtttccatttctagggtttatggggtttagtttctaaattagggtaaaatttggggaagaagaagacaacaaagatgcatataaaggagatatgcttggaaggtttcaaatcatacgcaacgaggacagtagttccgggttttgacccgcatttcaacgcgattacgggtctaaacggatccggaaaatccaacatcctcgattccatctgcttcgttctaggtatcactaatcttcaacaagttcgagctgctaatctacaggaactcgtttacaagcaaggacaagctggaatcactagagccactgtttcagttaccttcgacaattccgagagaaatcgaagtcctttaggtcatgaagatcattcagagattacagtaactagacaagtaagtcttatttaaggttttagtgaaaaaaggtttcgtttttaagttttgttaagagtgaattttgtttgtttgtgtgtgtttgaagattgtagttggtggaaagaacaagtatttgatcaatgggaagcttgcacaaccaaatcaagttcagaatcttttccattcggtgcagcttaatgtgaacaatcctcattttctgattatgcaagggcgtattaccaaagttttaaacatgaaacctatggagattttatctatgcttgaagaagctgctggtacgagaatgtatgagaataagaaagaggctgcgttaaagacgttggagaaaaagcaaactaaggttgatgagattaataagcttcttgagaaagatatattgccagctttggagaagttgaggagagaaaagtcgcagtatatgcagtgggctaatggtaatgcggaattagatcggttaaagaggttttgtgtcgcttttgagtatgtgcaagcggagaagattagagataattcgatacatgttgttgaagaaatgaagataaaaatgactggtattgatgagcagacagataagacacagggtgaaatatcggaactggagaaacagattaaagctttgactcaagcaagggaagctagtatgggaggagaagtaaaagctttgtctgacaaagttgattcattgtctaatgaagtgacacgtgaattatccaagctt

SEQ ID NO: 492 - DNA, 92493 bp, Arabidopsis thaliana
aagctttgttgcatttaagagcaatcccaatggtttagaaccaattggttcttaattttcaatcttagccttattttaaattaaaatgttgtttttactaagttaagaaaagttagaaaaaaacttaactaatttccactccaatgattaggaactattgggttcttaagaaacaaaaatttaaattattccaaaacaatgtcttataatacaagcaattacacaaaatgtttataatacaattcaaattattgaggacttccaactaggcaactacacaagatgcttgctccttgatttttctgtctagacaaagaatctctgcctccacgatggctaattcttgaaagagctcagaaaactgttgaacaataaaatctcatcattgtttgatcattaagaaataattaacattatgtgtgattatgtctattggtattgcctgaggtggaagaaacaatgaggagagacttgggagagaaacaatagagccatcaaaagcagctcgtaaagttctagtcactgcttcttcttcctctagtctctctttaagatgcatcacctgcataaacacaaacattcaaattattggtatagagattttgagttaggaacagaggtgcttactccttcctctaagtcatgtctcttgttactatgtagctgtgatgaatcttccatgagtagttcctcaaatttcatgagtttcagagaaacataagaagaaggaaacgggtctaagtagagaaagataatgattagagtgaaacgtgggagccattaaaagggtcggttcggagtactaaaacagttattgacttttgttttttggtcacttgaagttgttaagaagagataatgtaagtcacatgagacttgccggaataacggcggatcagattctgataaaaagagaatctctgcaaaatgatgtaaagatattacatgtctcagcttttgatcgtgtaaaatcagattgggagggtttgtttgttttacctttcttctaccaccggcatgtgatgtaactaggccaacaagaattccaccaagagcattgcttattactgggacctataagaacattcacagtgcagacataattgtttttctatcaacataatcgatttaggatattgagagatagtttcttaccagtgttaaagcagttcagccataaaagaagccatgtctttgtgtgttcttgtaatccatcctttagtctagctgttgcagaggaaatatatgattgtggtgaatgtgaattaacaaggatcacaaaacaataaaaacatacttcaatttctgtttattgtaccttggaaagaagactgactagtttctgttactaaggtcaccaagggaacaagaatgacatgacaatgatcagcaaggaaatataaattagactaaacatgaaagaagagctgtcatactatcaatcgctagaagctttacttataaacttacaggaggaatacttaaacaaaaaggaaaactcaaagctagcataagttaaaccgaattcattcattttaaaaactgattaacatgctcaagcattacaaagatgaaataacaaaaacaaaaagaagactaaattatgacacatgaaactaaaatgttgcaacagagagtgaattgaaactatgagtttgacaacatctcattgattaatttgttcttgagagccacttctatatcagtaagtggctctttttttgtgaagagagattccagcaatttggtccttgataatctttcttgcttttcaaaatcctccttctcttgctctcgatccttctgccttagctcccaatccttctgctttatctcccaaatagactgaatctccaacatcacattccctttgtcttccacagttgttgtcttactcacagccttttttgctttcgcctttgcagctttaacaccaataggacgagacattgcttcttctgcttcatgggtttgtggctgggaggttgaagccttgtcagactttcttcttttggacattacagttgctttagtagaaggagcagagagccatttctgttcaaagcgaagcactctccaagcatgctcaagggtgaacttaccatgttcgctgttgtagatttcatgtgctaatgcaacgacatcatcgtcattctgtccactagatttctgctttgttgcagcttcatagctccctacaaacttgcctacaccttcattgatcttagtccacctctgctttatgtgacctgtctctctcttttccacaccgttgagctttggacttgctccgtaataggcagcaatacgtgaccaaaaggcataacccttttgttcattgcctattactgcatctttacttgtgttgagccaagcactgacaagcaccaagtcttcaccggcagaccatttccttctctctcttttcaccttaggtgtgtgtgcagcttggtttggagaaacatcatcatcatacggattggtttctaaattgtgagcctcttgttgactagttaagaggttcatgaagcttgatccatgactatatggatccatagactagttctctggttggtgtaagaaggagcgggaaagattgtttttggtgtgtgtttctagtgtgtttctggttaggtgtttaaataacaagaacaagagttaatagtgtctggtaataatatctggttggtgtttaaaagttaatggtgtctgttttaagtgtgacatgacaatcaactaccaagtatcaaccacataccgacaacaagcattcaataaaagccatatatagtcatctaatataattcatgaaaagtcagaggttcaaagatataaggttaagattgttttaccttctatgagccttccattcggtaattgtatccaattcttacacaacagacatcaatcattctagcaactgtatccacttctccatttaacctcaacaaaaacagcataacaaaaacaagtgttatgtcatgaacgtaagacacaataaatctacaatcaaatacaaaacaagtctgtaatcaaatacaaaacaaatctgcaatcaaacataagataaatttacgataacaagcaaacatatatgtacttaaccaacataaaactgtaatcaatcaaaataaatctgtaagcaaattgataaaattaaatctgagtgtactaataaacaaaattgcaaacaaatccaacgacaaaatcctagttctacgaacggcaaacgacggcaaatcccaagaaatagcagcaatcaaaggaagacaagacaaaataaaattgtaacaaaaaaaaatacagattcgttggaaaagacaactccatgagaacagagaattggacagcaacctatgagaactaattttcctatcatcaattcccaattgtgaaaacccctaatttctgaaacaaatataaaccctaatttactatctacaactgaaaacaaagagaaataacacagatttgtaccatttatcatgcagatgatgataatagcggctcaaacaagtaattatgacttgcaactctctcaattcgaaggatgaaatgttggagagattttgccggcagaagcgagagataaatatcatgatggagaagaacaagaaagagagagagagagatgaatatcacgatggagaagaacaagaaagagagagatcgtcggattacaatggtcgccggcgtcttgagagagatggagagaaagagagaggaaaaacagaaagagaaacacgagtgtttttttgtttcctccttttatttattttttctacccactcaaaacacaacatgtgtactcttcttagttttaagaaaatatcttaattaagatgtttatcttagctaagatttgttgatctcattaaatttaatcacttttatacttaagaattagctaagaattgtctaagaaccaaggttggagttgctctaaagtcacaacgtatttctgacttccacgtcttctatctatttacaatttacaaaatcaatcaagcttttcaaatgcggtttaaaattgattaaatcatagttttagatcacataatctaaatcaaatttatgcttgtattttcatttgattttgacagaaaccaaaattttggaaatgaaaattgcaaacaacaattacataacaaaagaactgttatggttttgctgttctttttgggcaaactagttatattgatagaagaacaaacttgaagtagcagacaagtagagagtgcagttttagccaaaacgttagctaaccgattagacttgcaggaaacaaaagagaacttgatatgaaaaaaaaaacgactaagaaaggcaatatcgtggagaatcccttgtagattgttcgtagaggtctttgtatttagcagagatataaagacttgagagtcggagaaaacgttgatggaggtcaattccattctagtcgctgcgatcaacactgatttcatagctaaagccgaggtgagtgtgtgcgtgttgcagctccatggtggaagactcgattgttctaagttttgaaaagccaccccattccgcacaaacctgcatttgcagtctagaccgtatcaataaagcaagaaacaacctctctaggagataagatatgtatggaatcctccgtacaaggaagaaagatcaaagaaaccttagtaataaaaaaactgcatggatctggatttttggtgtcaacatcctccattacatgtattctgtatatttctcaacaaccttgaaataatgaaattttcaaattggattttattaatttgagtgaaagactactaacaaaaagttcttatccacctttatcaaattttctccattgttatgtaatccaaataaacattgtcctgcgtacaacgcatcaagaacgtatgaaatcaatattgcaatttgcaattgtattagcttaatgaaaaccaaatttggtgaggattatattttgaaatattgtggtttaatgaaaacccgtaaatcttgacaaaaaaacaaaacaaaaaaatgagaacccgtaaataaacgttgtataagtaaacgtggcattatattttagtagatttacgggtttgagatattttggttgaggtttactatatcatttaaattgggattctatactaaatttggtgatttgaatttaaaaatctttcaagaaatctatcaaaaatattctcatataatatgagtatttgtttttttttgtaaaagtgttggtcatatagaattaaataattaaaaattggccatctttccagttgccgttgccagccgtttcctacttgtgctttttcacttttccgttctctcaaaccttttttctctgcttccgtttcgtttctccgttcaaaacaagatcgaatcataaaaagtttcctcctttttttcttctcgaaacaaaagagaattcttgacgtcttctactccattttccatcaatacccatttcttctatcgctctcgtttccaagaaaaaagagggttttagagagaagcaaaactcaaatggcgacgaacatcggaatgatggatagtgcatacttcgtcggaagaaacgagattctgacttggattaatgatcgtcttcacctcaatctctctcgcgtcgaagaggtacttcttgcttgttggggttttgtgttctatatcttgcatgagtgctttctctaattcttctatggtaatgtttgatttgggaattagggttttgaacttccaaggaattgtagatttgggtttgatttgtttcaattggctaatgagatttgtaagttaatgttgagttgagtctaatgagagtagacaaagggctttaggctttggcattgtatgattgcttacttgttttgattgttataatgtcatagattcactgttgtagggatctaaagagttctactagttttgtattgaactactgttcttgaatgaaaattttgtgtcactcttgtctttgttctaagtaaacaattatggattttgctaggctgcatctggtgctgtgcaatgtcagatgcttgatatgacatttccaggagttgtgccaatgcacaaggtgattttgtcacttttatatttatctaatcttacgatcattactttgcttcttggtgactgaatatctgaaattatcctctgcaaggttaactttgatgcaaagaacgagtacgatatgatacaaaactacaaggtcttgcaagatgtgttcaacaagctgaaaattacaaaggtaaatcaatcatctctcgatgtatcgtgttcttgtgatacctgtgtgctgtgtatatagagatttctgaccttgtttgtcttactgagaaaacacctcagccattggaaattaacaggcttgtcaaaggccggccactggataacttggagtttctgcaatggctgaaacgtttctgtgattccattaatggtggcattatgaatgagtatgtcagattttttgtatttgctaatcgacctctattgttttccaaacaattaagtttgtaaaatgtatggtctcttataggaactataatccagtggagcgaagatcaagaaatggtaaagagaggagtgtgaagggatctaataagattccaaagtcactgcaaacaaacaataaccatcctccacccaattccagttcagttggtcttagcaaagcatcaggtctgccatttgataaacagatttttctatgcaaacaataataattcttgattgcatttttcttaacatgttggtatcatcataattctcagggcccaagtcagcaaaagcagctgaagtgcaggctttgtcgaaggaggtacattgacatagagaccatcgctcttagttttcacctatcctctaatgaacgaaacatccatcatatgtcatatataatcctttttcatcttctgtgatacagctcgtggatctcaagatctctactgatctcttggaaaaagaaagagacttttacttctccaagctccgggatgtagagatactctgccaaactcctgagctagatgatcttccggtaaacgtttccgtagagcctgttcttttttttttttttaatcttgtttaagtgtaccttgcatggtatagccaccaacttcactatttagctccaagacaagttttccaatagtctagaaccagaatttagtttaccggctgttataagtacacataccgttcttagaattaagaggaagataaagagctcttaccaatgaactcctcatagcaccaccagatttcatcagcgaccgcattttatgtttttcatcatatgaactcaactttatgaacataattttgtttgaatctgatatatatgcttccctggaatgcagatagtggtagcagtgaagaagatactgtatgcaaccgatgcaaatgaatctgcattagaagacgctcaagagtacctaaaccagtccctaggagttgaagatgatgaagctgaaggaaacggagaacaactggaagaagaaaagactcaagcctaagctctgactattaacaatcctaagtagaagggtgacgaacaatggctggccatggccttctcttccaagtttcttttgtgaaaggaaactaactgaaacttgaagatgaatgagcttcttctattagaaagattagtttgaaaacaaagagacttatttttgttactattcaagaggcttttttcttgttttaaaacaatactttgacccaaagtgagaatttaagtgtcggtgcttcctttttgttttgtttctctattaactcatgaatcattaatttaagacgaaacagaaccagagctggttagttcaatttcaattaaaaatccaaagttgtgtgttatatcttaatccacaaataaatgaaatgatctcacctatgaatgtaccttcgtatgagatattgatttgctgaaaaatatctaactaagagaacactctactcttcgctaccttcttggcttcggcttcactcaaatatcgaattctattctcacgtagccacttatcgcctctactcagaccgtccttcacttgcttctcttccatcttcagaagcgtaagcccctcacttagtttaggaaagaaaccttcgggtctaacacaccacgtccggaaaaccccatatagaacctccatgtctacttttaacctttcgactccatcattggtaaacttcacgttcgccatcaagatgctgttgaagaacaacttgtctatctctgaggctagagttctccacatagcggtaaagtctgctttgtttagattttcttctattatagacgtttttccttgcaagtagtctagagccccaactagtgcccttgacaccgtccattctttgtctttcttctcctgccattgctttctgttttttatgtattctcggattcgagcatcaaagcctctcaagatcaccaccgacaatttgtttatccactctagccggaacttctccaacttttcaaattcttctccgaaaataccttcagaaggttcagtaaagttctccagtcctggaacttcctgtggatcgtgctgtccagttcccatttcaaggaaaaagacatcctcagaccattcttctaagacagattcaatgtagtgaccagcattaatagagttcgagaccttgattagatcgttattttcagttaatgcagttagtccgtcggcgtcttggcacctgagaaggaggcaatccaagaacttatgaattgttggtgaggctgccagtctcaggaacctagccctcaaatataaggccggcactgatttggatcgttcgattattgatgacaaatgctgtagaaagatgctggaaatgattggtggtctgtaaacgttggaactggagatgagttcgtcttggaccttcgctgtccaatttctgtcgttatcaatctcctccttgaatttgacgagcctctcatctagctctatctctgcccataaatcaagccaatcaggtctgtcacagaaaactgagagagaggaaattctcaaaagattcccatcttcttgaagcgaaagtattcctgattgtgataccaaagactgaactcgcttatcaaaggagatcatcaggtcaatgagatggagccacgagaccttagcctcagaacgaagatcagtttcatttgcttcgtctagctgaccaacatatataggaaagatctctttcaccaagtacaaagacagtgagcttaccatagccgaaacccactcttctcggcaactgtacccagctagttttgcttcatccacaagcggttgtaacaactcatccatagaatcgacatagtcccttgtgattttatacacaagggcaaaaatgaattctggcttttcactccactttgtaaaatgtcgctgagatgcaactgtcagagggttgaccagctcttcaatagcccagagtggctggtggaaaagaacattttctcccttatggatcccaagctgccgcgactttctttgcaactgtaacccctgcaggctacacaaggcatgaaaacttccacagtattgacttttgaggctcccttccatgttgaaaagcggattttgaacattttctgactttgaatcaagacttgccgaagttagtgtagaaagctgaggtggccatcgaagagaagaaagcaacgctctgtaatcagcaattgcctgaggtctcatcatagctaaagctctatcaactctatgatcaacagcagaaacaagacgtgcccaccgaggatgtctctttgctactgaactcagtatctcttctgtcgttttaagtgttttaatagcatgtagacgcacttcctgaaatcagtaaaaacttagaacattgaaccacacacactggctaaaactacggaacagtctaagctgaagacagtgtgcttacttcaaaaccacttgaccgagatgttcttaagtttttattcaaagaagacatcacagcatcctcaatatcaccaactaaagtgtcaagttttagtgcagtctctgaaacatagagaaagatcttaaaatgttgaataccacagtgaccaaactaagaaagaaggttggtaactccaactttgggactaactaatcccgatcaacatcgataacaccaaatcataaaatagagctagtctttatcagaaagcagccatcaaatacaaaacgccttaacaccaaacataccagcataagcacgcacagactcaacttgtgctacttcctttgctaatgaaggaagatcctctccggctacatgctccgtcgcctcctcctcctttccgctatctgaatgaattaaacaattatcaaattctcaaattataacgggaatatattcaatcttccatcaccaggactgaatttacatatttgactacaacatttcaagaacataatctacatccagaagaatcgtgatgaaatcatacgaacctgacgcggagcgagtaacggaggtagaagaagagagatcagccaatttggcattaacctcgaaaaatagaccaccgacgcgatcggaaaacgaagcgtaagcagcgagacctgactcgagctggcgatttaatccggccaatctctgatccaattcggaaatctccgtctgtaactcggaaaccagacccgtagaatgagagagatccgtggattctttgaatctgccatcgagaaagctaaataccgaagcggagaagctcgagacctgtggaagtggtttgatcgcctccatttgcgattcgtcgtggcctcagtttcatcaagaacaatgaaaaattgaaatttcgttggaagaagatactgagtcaatgactcggagtgttaacgagttgcgagttttggtaactcggattaatgggccctggttaagcccacaaaaatgtttttaacatatcaagtaaattaaaactgtaatggcattctcaaagaaatgacattcttttatcggaaaattatcactaaaatctccaacttttatttgaaaacatttgtttaaattctcaacatccaacgaaacgaaataaatatcaaatttatgttgatttttctaataaatatcaaacttatgtgactttcttaataaatacaaaatatttgctaatggtcatattagacatgatgttaagtagattaacagattccgttaacaaaattaattttttattaacatacccgttaattcaaaacattattgctttctataacaacaaaacgttattgttttctataacaacaaagcgaaaaaaaaacaaaaaaaaaacaaagtgacgtcgagcaaaatctccaaattcaatcaatcatggatccccaaatcgagcaaaatctttaaccttaaattcctatatgacttgaaattaaaaatttaattgacccgttatgacaaaaagacgatgttttattcttagagagaacgttgtcattttcaattaacgagtctattaagagaaaatgaactttgatagcaggatttgttatcccacttaacggtatgtctaatatggctatatcaacaaaattttattatttatttggaaagtcaataaaagtttggtattttacagtatttgaaaaatcgacagaaatttgatatttattttgtttcgtggaaaattgaggatttaaattaacgttttaaacaatttgaggattttgatgacattgtttccattcttttaagccaaattaggataattaatcaatggaatcgcaccagcaaactcaggattagtattttgcatgcatttcatataaaaccgagagtgtgatgtacacgcgcatgtatatttaagtacatatgattcctaaaataaacaataaatttcgagttgtctaaggaaatgtgtagtattgagtctcgtacatatttgtatatataaatcatcttacacaataacatagaagcgaatcattgagacagaaaccatatggcaaagagatctccgtaatctttcttggaattctatcgtactaaaatctaataaagttctatcaatattttaaagactccttcaacttgggtttcttcacactttcaaaaacaatatttcatgtgttttctttttgtgtacaacctctaaacttggttggatataaaaaacacacaacatcgaaaattggttgggtgttagtgtgggctaaaaattctaatttcccaaggattcttagtttgtgtatttctaatgtcctttgtatttcttataattttgtttggcacggatcatctctgttttaggttctctactttttgtaatacataatcttaatcatctaatgatattatttggaatgaaaaaagtggagcaatgacatttagcaagaaacaagtttctgttaaaaaaaaaaaaagtttctgtttacatttgaaaaatttcagaactgattattacaatgagaagtagacttgagaacttgtaatcaattgagtgtgtataccgtacgctaaaaattaatattatattagaaaagttaaaccaaagaaataaaaactaaattaaaagagagtacacatcgtgattcttcgctgtatattccaaaaactcatgtgccccgacgagagctgagatccaagctgaccacgcaatagtaccgtatattgattagttaatcacaattcacaaatattattatttggatatttttgggttacattttatagtttcttttaatcctcggatttttaattacggattataaaaaaccaaaacaataccttaagttagtagtttgaaagtacacatatacatatttaatcacacaagttgagacgaccaaaaaatttaatttaatcacatagtttgcaagatgtgcttgttttgatctgtcaaaagaggaattgtctctaatttatttccaaaattatgaacactcatatacggatgtaatgtacatgtataacttttatttattgtttcaccttatcaaaaaaaaaaaaaaacaattttaataattgttacacaaatgattaaacatattttatcgggtaatgatatactaatgagtcatgagtccatgtgattttttattttgttttttgatctaaagattcataacttaagtattctggtgtaaacataaaaagaaagcaatttttttgaataatacaaaaaagaaatcgtttattttcttaaaactgtaaataaaatcaaatgaaaatgtaaaataaaataataaaaaaatgtaaaacaatccacatatgaaaaaaaaatctattactagattaaatctaataacgatttaaaaatagacaatacgtgttcggaatttggaatcaaagtccaattttctcttctaacttcttaattaaaaaacaaacttttagtttacaatttatttaatgaattaaattaaaaatatattttttctcaattgttggtgtaaccataattaactaatggaattttttggagaaaatattaattacttcaataaaacgaatgttatttattatctaaatataaagatattacatgatgggaagagagacgggttaccatatagtttgatacctagacaaatttctgtctgtagactataaaattatttataggaatcatttccattgattagaaattcttgagatatagtgataaaattgtcagatctaaatggataaataatcgagcgcttgattgattattccaaatttgcaatatattaatcaactgattgatgcccatggtatacaaataaaaatggaagaaagaccaaactaaggtacactcaaaatggaaaagactgatattagaattgtttaatttcatctctaataaaactaaatcaacttaattatttatgtttgtctgtacatgctcaaattagtatatgtactagatcaagtatgtaactatataaataaattaatcttgcaatataactatagaagttgattaacatttccaggagttaatcctaattttacagttcttggattaattaagatatcatacaaactaatcataatttgtagtctagtaccaaagtttgtattatcaccaattccagaatttatgcaagtttgccgataagtatgacaaacatgcatacatattctctttgtcttataaacccaaaatgttttagtatactctattcgtgccaaaaaaaaatatgaaagaaggtatcctccaactataatcaaacatcaccttttaaatgatttactaaaatggcacaagatcactcttgttctgaagttggttactagtgaaacatatatagaaaaatgaaaactggattagcaaaaaaaataatgtggaattaaaatgaattttaatcttctattttataatgaattgtaattggataaatggaaatgtttttcctatataagtttaaaaacataacgagacgaaaattttctaccgttaacaacaaagatgttcttgcaaataagataagcgtttttttattgcacaaatatatctataaattttagataaaatataaattcttacccattgagatttgcataatactattcagagtgttttttttccctttcgttaaagactactagtcagagtgttaatctagtaattcaccaattaatttaactatacttaaaaatattacagtttttaggaaacatgctagaaaaaacatatataattttgcaattatattattccatgcatacacatgtagagccaaaaacggagaaaaatcttctatataaacacaagttgaaaccattcatgtttattttaagcagttgcagtagactcttccacttctgtattcaattcttccttcttttttctcttataatataaataacatacaaagaaaatacttgcactcacaaatattgattaaagttaattagtgaaccctaagatttataaatctctagctatactctaccatatcatatatattacataatgtctagcagaaaatcacgttcaagacaaactggagcttccatgatcacggatgaacaaatcaacgatcttgtcctccagcttcatcggcttctccccgaacttgctaacaacagacgctctggaaaggtacaacgttctaatcaatttttcattatgattccttttaaaaaatttaatttcctctttcaaaccttaaatcttttctaaacctttttaaatcttccttggattagtagtgggtacttaaaagaacaaacctccggtttaaaaaaaataaaaataataactaatatatatcctccatcaaagtttaacagtaattctttcatctttctgttgttgcaaacaaacgagagtctttagttagaattataaataaatattaaactaatattccatatattccaatattgcatgtatgtattgattcatttgattgtgatgcattttgtgacgagtgctaaattttaatttccaaactaatcgacaataaatagcatgctgcatgcatgataattaaattgttaattatatataagatccttcttcttatcaatatattggttactttcaggtttcagcatcaagggtattacaagagacatgcagttacataaggaacttgagcaaagaagtggatgatcttagtgaaagattgtctcaacttttggaatcaactgattcagctcaagctgcactaatccgaagtttgcttatgcagtagaattagtgcaataaacgaaggatatttttttcttttcttttttttgaaaaaatgtcttctcagttttaattccccttcttattgtatttataatgtctggcagcttgtgtcccctgttaattatgcaatgttttatttttaatatatgtagggttttgtttttgtcagttgttgaacgaagcaaatggtttgggtttacgttcacattatttaaggcaacacactcaatatatgggcttaggtatttcttagattctaggcattccaaccaaatccatcacattttagtagcaaaaacattgattaaattttgaatttacgagaagaacaatgttttctagtgtcatgcatatacgattataacggtgtttttgtagttaatatcgataggaactaaactaacgcaagtcaaattttctgatcaaaattagtcgttaatttcgcttaatggtataaagtatattttaagaaggaataaaatatgctaataagcccccacggtttccatttctggtaacaagaataccattcaacgtctcgatcagcagcaacgttgaatcgttgatatctatatatagaagtatagaaccaaggggtaatttggtcattccagttctaacccacttctattacaagagcagtttactacgtaaaaacgaccggccttccactttcccgaaaacagccagcgcccgcacgtagagatttactgcatattcagttttcagtaaataaatagtccacaaaattagtggccttgcgtgtaaaaaattaaatttcgagatgctgtttaataaatgtatttattgcaaataagaaatcagatagcctttaatagttgacaaaaaatagccttttatatttacaagttcgtgtatttgttaataacgtgggattaatgagtttaatgtaatcgtgacaaaaacaaaagtgggattagtgtaatcgtgtgaatgtggacacttctccttcacggcaaaaggcacaagacgcaacaaatattttaatagaaaagaaaaaaaacgaaaacagacaacaaaacccaaaacaggaagacttaaacaaatcagaacacagtgtaagaaaaatcttttccataactgtatttttaactattcatatatatatgtttagtctctctgcagtttgaattcaaacatttgtgctctctcatctcaaaaactacactaaagctataaatcatcaatcatctaaaatcttcaaaaaggttttgattctgacttcttggttttcttttttgtaacgaattcatgatttttgagtctgattctgtgtttccttttgtttctcagcaatggattattcaaaaaccgaagaaacaccgataaacgaagaacaagggtcaacaaattcatctgaaagcagaagcaatgaagagttattctctgattgtgatcaacaacattcttccatagctaacgagttcggactaacggagttgcctaaagacgataaagtttacgagcttatctaccgtcattgccaatctaagctaacttctcacttaagcaatcagtttgagattgtatcaattctcaagaacggatttcaaacaccattaggacaagctaagcttaaagcctttcaaatatacgctgagtctgttgcaaagaaaagcggcagctgctgtggaaacaaagctgcggtggctgaagcggcgagagtgaaatacggttgttgcggtgtggagaaggaagagttaaaagcgattctaatgtatggatttagcaacaatgccttatgtctctcaccagacaatgctcctcttcaatggtaaacaacaatatacttttttttttcattttgcgtttataatcttcaatgagtactctttatcattaatgttttcttttttctttgtataagtatgatagatccttcatcatcttgtaacgaagacgggattagcttcttgctgttttcaagaattattatgggaaaatcagaggttgtgtgctcgacatcacaatcgtatccgagttctatggagtttgattcaggtgtagacagtttgacatctccaaacaagtatattatttggagcacacacatgaacactcatgttttgcctgagtttgttgtttgcatcaaaactccatctatcttgaaaagaagtaagcactcaaaaatgtttgttcctctcttctttaattcagttgctgatttggtatgtttatttgatatagaaaacccgaaatctccttggatttcgtttccggtcttaatcaactcgatatcaaagtttctaaatcaatcgcaaatccgtctcattcataaacactataaagaacatcaagtaagtccactttctttggctctctgttttacatcttcatcataatatattctcattgttggttcctttgctactcacaggataggagaatctcgcggtgtgagttgattcaacgcctgagaagtataactggagatagcttattggttcaaatcatcaaatctgttggacaaaaggtacataaagacacatgaatacaaaccatttctggttttgtttctcatacataacttccacaatgctggttcttcgattatgtttctccgataaatgtacagtcacagcgtggctaaacgcatcgatataaagagtagtcgtttattagctacaatgttgattacactagaatttggatgtgtcacactgatagtagtgtttaatatttgtttttttaatcacaaacttcagtctaatttacatcataattacgtaaaacacaatttcaaataaacacgcctgtgattttcctcgtataaaactacaacaacgaaccagaaaaacctgtagagcgcaatccgttaagttaagaactgtgagtgtatgtgtatgcgggcggattatatttcaattcacgatgaaaaacgtcgggaagaaccgcttctagaaaaacgtcgggaagaagtggaaccgcttctagtaaaagtagcaaactcaggatcaatcacaattccctgaacttgtcttcgtcctctccgtcccaacaagtttactccgccatgtcctggtgccaccggatctgtcacgggaatgttttcaggaattggcatctctgtggagtgtcctgagatgcacaatgatcctgactcgtcttgttgccaatacacctccaccatgactcctcgtggattctctgcagtttctgttcccggtatcccgataaatcttgcccctaccggtatctgtagattggaattggatcggatcattagtctttctatttatagatatgaatgtatgagatgtaagttatatacctcgactgaagaaccagatgttaagtcgagagtgaccattgttccatcaaccgcagcgctttcgagttcagcttttcttgctatgttcaaaaagacttcttcaagagtagcaagaccaagttggatatctgagattccaaattcttcttctctgtcttgaagctcagcgaaaaagctctgtttcattgtcacttatgcttagttttaaggtaggtagtgaaatctatatatcataaggttgtgtaaatgcttactgtcaaaagattctctttgtcgtgaggtataacaaaagtcatgaaggccttgttttcttctattggtttgactttgagatgctgcaagaaaatatcaaagttcggaagggtgttggattaagttaactacattgtaaaatggaaacagtgaccgggtgctaaaacagactcacatctttaaagaatttcttcactggctcgcgtgaatccgaaccagcttcgccattgtggttgttgctttcaacaaagctaatgttagcaatgaaacctgtgccaaagcgggatttcaacctgatcgaggttccaatgcagcggagcctacccttagccattatccctatccgatcacttaagatatcagcttcttccatcgaatgtgttgttagtataatggcacgacctttcttggtttcctgtatgatatcccacacatgtctcctcgtgatcgggtccatgcctgtagtctgtaacccatgtatgacaagtacgcatgagaaaaggaagagggacttaaataaataaacatcaacagaataaatgttacatacaggttcgtccaggaagaccagctttggatcaccaatgagagaaactgcaacactgagtcgccgtttcattcctccactgtaacttcctgccctgattttccctgcttctgttagttttacctccgccagtgacttctcaaccatctatatgacgagaaagtaacattttaagcgacaaatgaggaaaagtattcttgatttgaagtaaccaaccgactaaccaaccgactcatttctaccatttgggtacataccgagttgattgatgaaggtggcaaccctttgatgctagcaaagagtttgaggtgttcttcaccagacaaagcatcccaaagaatatcaaactgtggaacaggaatgtcataaatcattgaaagcataacaaatatctgtaactaattaaagcaaatgccagaagcagatagcaacaaaaaatggctcacctgaggacaaactccaatcattttacggatgttggacataccaacagagcttcttatagaatttccataaattagtgctgttaaagccaaccagagagatattagtatggtgaaaaggcttaggacactagcttctatgaaacagaaacaagaaaaaagtgcaagctttatcttaccatcaccaccagtaactggaaataagcctgtcaaacaattgatagtagttgttttccctgcaccattgggtccaagaagacagaataattgatctttggcaatattcatccacaaaccctgaataaatgaaacacgtaaaaccacatggagaaataatcagtaaaatttcatccaagtcctagatatagatcaatggtaagattatcatttggtgaacatctttggtaaagaacagacactaccatgcgaaattgcaaattaaccaacgtaagaagatcagtttttcacttttgttttcttagaagaaataccttcagagcatgaaaaggggaagttttcttgcatttgcagcatccaaacttcgtcgtcccaggataagtctttgcaagaccacgtatttgaactgcaacgttgggatcaactaaaccctccattgaatgttgtttaactaaagtttcctcttcaaggacatcttcgtcatctggggtaatgtgatccacaggtggaactgaaccaatacaactacaaattccaccttctgttcataatagaaacgtttacttaggatcacttttacgacaccaaaattactaatgaatacagaaacaagactgaggagaaagtaccttctactcggttgccacctttgccggtccagtacccaggttttagaaagtagaagatagattttcttactccagaagcatttggagttatattgtcaaagtaaagagccaaaacaaaccacaaaaagaaagtcccaagaagccacaagtagatatcattctgccaaaaccaaaaagtaatgatcagagaactattagacagagttattagatggaaattttattgagagttgacttacaattgtaagcacacaaccagtgtcgtcgttaggaccgcattctgctcttttactccaactaataccaggatcttgaggagttgaagttgcatcagcgagcaactttaaaccctgagaaaaggtattgggtgggaacagtgaccaaagtgccctgatcatacgagaatacttcttggcatagggaaacccacttgatgttgcaagctgcagttagattatatgattagcaacacaattgttaattcgaagaaacagttccagctatttgttttttgcatgagagaaaccgcacctgtgttacaaagccaaccagaaacacaaagaaaccgacagttgttgctgaagttgatttactgataaaagctgatagcatgaatgctagtccaatctagcaccacaaacaatgaagttaataatttaactgatgtgccaaaagaggtgtaaacattagtcttagcaagagagttttaccaaattaaactggaaaagcatgaaaagtaggaagacaacagggaaactgttcttcaagaaaaagtcgaactggaacatcattccaaacagaaccgtcaggagcgccgagatggcagtaagaattccttcccaagtaagccatgacaaccaataagcagtgtcaaaaacacccatcatcgtcattgcctgttgcacaacacaatcaatctactataaagactttgttcacagcagcctatatagaaacaacgttatacctggcgaagtttaagctctttctcagtaatcaaagaactaatctgaagtacaaaaccaaacatagcaaccgcaaggaaaaaagtcggtcctatagtgtccaacgcaacaatagcttcaatagttgggtgaggaaactccttaaacccaacaacccaattaaagttcggatctgcaaaagcgtaacaacaacttctcaacgtcaagaactcaacactcatgaccacacactcaaaagattcaacaagataaaatgcatacctcctatcaacgacctcgcgatttcacgctcagccgcaatttgaagaggtatctgaaacttaaaagtaggatcttcaaaccttcctctattcatctctggagttgagttagtttgaataccataacttatcactgtagcatttctttcaataaagtgcaaagctcctggaactaacaaaggattcgccataagccacgtatctaccgcttcaggatccacgaatgatcgtacctaaatacaatttgacttccacttttagtatccaacacgtaaccttttgtggttaattctcaaaacctaaacctaacaatttggttttctatatctataacatcactaaaattgcatcacatcacaatcaaaatctactctgagttctttctcctgaagaatgcttaattacacaatttgactaaatcaaataaaagaagacaataccttctcaataggaatacttcttccaggattattcttcataatcgcattaacaatctgcgtgaccttggagctacgattaccgctccaaacaaagtcatagcaaggaagattcacgaagaatttatcttcacaaggcggaatcggcggcgatatcagcgccgtcggatccgtaacagttttgagagccgtggaggaagcgaaactcttctccatggctgcttggatacagaagatgagaaggatgaagaagaaagaagcgaagagctgaagaaacgtggctcgtttgctccgccatgaaagcaaaaggtttttcttgaacaacgccgtgtactgttgcaagagaagaggtaaacctctctgcaacgtcatggccgcctcagagaagttttttctcttctctctgggaagcttttttttcgaattttgggaatcttactgtgatctgattttgattggaggggacgatttaagagaggcgtaagattttttttttatatttatgactctggagttgtgagtaattacgaatttgcctctcgtattttgcctgcgaaactacctggaaaaacgtaacttctggacaaaaaccgtgtagtaataaatgtatttacttctgtaccaggaaaaggtattactttgaggctttgactgtaagcaatcattactattatgttattattagagttgaaaaacataattaaaattattatattgtagatcttttgagctattttctaagttagacgaagtaatcgtttgatattcaacattagtttaaaatttggcttcgtagatttcacataggaaaatgatgaagtgtgacatttgattgatataattggaacagtccaacaagctagccatgttcaaacttaataatcatttttaatttgaatgtcaaagaatgttgttcagtatattttgtcaaacaagagatccaattcttaatgtgtacttttctgtgtactaaaattagcaaacaaatgttgtatttatggtcttagtaagaaaaaaaaaaatgttatatatatatggccgacaaaaatatgttataaaaaatcattcatcaaaaataataatctttatcaaaaaagacaaaatataaaattgaagacatttttgtggacaaaataaacacgttcatctacatataaatgattaatttcttgtgtttttctttttctataatttattttgtttctgtttttctataagatttgtataaacaataaattgctataaaacacataatatggaggcgtataatcaaaaaaaaaaagtaaaataaaaaaatgaacctttgtaaggtttatgatctactatgttcatagttaaaattgcagtgtgaaaatttaaaatttgatctgtaattctaaaataaaaaaattgaactattggatcatctgattttcttgttatcaataacagataaccatggctaaaattgaagagataattccagagttagtatggttgtgacatcatgcatgataccatcaaaactggccaaacataaataaaagatttttaaatgaaaatcaaatacttgagaaaagagagcattgaaccatttttccaggctttttttcactattttcttaagagaataaatttgcttctgttgtttgtcctttaaataagaaaatttactcaaaaaacacttttgagtcttcaacaagttgatgatattaagctaaaagtatatcataaaaattagtaaaccgcaaagcctcgcgcaattcgtctactaaaaaggcaattccaactatatcatatattttctattatttttgttggaccgtacattacttgtcattcaagtaaccatcacatagacataggaacttaggaaggatttggtagattttttgaattatatcgatagtgcgctcacgtaacacctagctataatataatagtaataatatcttttattagtaactctcaaaatatatattttaaatccgcatgttggcaaatcgaaagggtcgtgaggatcactcattcgcagtttcttgtaaatatataatgaagttccaatgtttatttattttttcaaatgaaataaaaaacctaagaaaatatttgaacatcaaactaaattattattgttaaagaaaagtattttggcgatggttaaaaattaaaagagaagaacaaagaagggaaagctaccaaagctttcatatcaatggcagattctggcccagccagtttctggacgcgtgccaatgctatacttagaaaaaacttaacctatcaggttcgacattttcattttcccttagtaattccactattacatgtaaatatgcgaccatgtacgatttttgttacatgtaaattctctgtagtattgggaactctagggattagtttttatgtgttgtcttctttggtggtttttttttttgcagaaacggaatatatggagcaatgttcgacttattatgattcctttctacctctgcatagttcttgtgtttattcaagctttgtttgattcacaagtcaataactctttagataatcaatgtggttgtcaatgcattgacaaactcggagatggtaaatgccaaatgacctgtggtttagaatattcgactcgggatcaaggattcttttgtgctatcccaaaaccacaaccatggcctccattgattctaattccacgtcctgagtatcgtgctcttgatgctaatttcactaatgactcgtgcagacgaaaaaactcttgccctgtaactatacttttcactgggaataatcattctcttggagcaggtatttttctctttatcatgaagcatataattctacattgttttctcattggaactaatgtttatgttttctctagttttatcaagaaatcttctaaggaggccttttgcaatgaactcctctgaccttttgtttagtttagcgaataatgttttggtaagtttcatgttctagttcaatgtctgcattatgaaagtgtgtgaaatctctctgtcttatacttttttaacttgtgttttttcaggctacaacatttaagggaagtgcaacaaattatcttgatgcagggattgtctcagatggtagcatatacaatattcaacctcggtgtcctccaaattctaacttttcaatctcaatcggacaatcacctctcaattttacgaaaggtataaaggttttaatcctttagacatcacttgagatgcatactttactttatgctataggatattttactcttgttgtgatattaacttagtttttgtaccggaaccagatatgagatgtgttcaaggattgaatctttggagaaataactccattgaggtgaatcttgagcttttcgaaggttatcataaaggaaattctgatggaatgataaatgagattgttgcaggttaatgtttgacttctctgtttttttcttttaaaatctagggttatagagccttagtatacacatgagatttctgaatgtttttttttttttattgccttagcatacgatctcttcgacacaaatatgactaacttcaatgtaaacatatggtttaacgcaacatacaaggatgaagcaagaaatcagccttataaggttgtccgagtaccccgcttagtcaattgggtaaggaactaattgtgatgtacctaaaacatccttgcattgcaatataatctttcagtgtaggactagtttcaaaaacgaagagactctcaaactctgcaaaaatgcaggtgtcaaatgcttatcttcaatatttgcaaggccctaggacaaagatgttgtttgagtttgtcaaagaaatgcctaaaccagaaactaaacttcgtctagacatcgcctctctaattggtccaatattctttacatgggttattctccttctgctaccggtaagtttgcttaaaataaactgctttaggctgtcactatactcatcgacctatatatgatgatctgtaaatctatgaagcatttatatgcaggtgatcttgaattcattggtgtatgagaagcaacagcgtcttagaattataatgaaaatgcatggcctaggagatggtccatattggatcatttcctacgcctattttctcgctttatccacgttctatataatattcttgatgatctttgggtcagtaataggtattgaatcattaccatatcttatgttattattttcttgtccttatagaacttgctataacagttatggttcctttcaggattgaagttctttctgcttaatgacttcagcttacaattcagtttctatttcgtctacataaatctacaaatctccatagcctttctactttcctcagcgttttcaaaggttgagacagcatcaggtacgaaataaaatcacacgttaactaaatgtgctcaagaacatgaaggtgttaataaaagaaacactttctgtttcatggcaccactatagtcgctgcttacctatacgtgtttggatctggactcttgggtatgttcctcttccagtttctattggaaggtttatcgtttcccagtaagttatcaagatgaccttgaggaataaatatgcgctatttcgttgacttgtttattctcacaaatgggaacaatgctaacataatatttactttttctaggaagatggatttttgtaatggagttgtatcctggcttctccttataccgcgggttgtatgagttctcccagaatgcttatcagggaaacttgaatgggaaagatgggatgaagtggaaatattttagtgataatgcaattgatgaagttttctacatcattattgttgagtggtttgttgcactcattgcaacatactatatcgataagatgtcttcatcaggaaaagaccttttgtttttcttgaaaaaccaaaaccctttcaagatatctcatagcttgcaaaaacaggtctctgcaatttccgtagaaatggagaaactagatgtcattcacgaggtattgcaaaagaattatcacattctattccatgttctttgtgtttttttttcttcagctgttttaaattatatttctacattttttttctaatcagagtgaaaaagttgcacaactgatgctagagtcaagcacaagccatgcaattgtatgtgataagttaagaaaggtttatcctggtagggatgggaacccgcctaaaaaggcagttcgagtgttatccctcgctgtgccttcaggagaatgctttggcatgttagggcccaatggtgctggcaagacctcttttatcaatatggtcagtacacaaatctacccctaaaaaataaatagttgtgcttagcttatgactgaaaaactccccttggataataaaagttgcatcgttttttctggttagatgactgggcttgtgaaaccaacttctggagcagcttttgttcaaggtttggatatatgcaaggatatggacagagtatacactagcatgggtgtatgcccgcaacacgagtaatcaagttcttaaaacattttatttttgttcaacaatacaaacgattatttagttgtttatcattttcattgtctattatgtaccaccagcttgctatgggaaacactgacagggagagaacatctgttgttttatgggagacttaagaatctcaaaggcgttgatctcaaccaagtatgttatcaatctcacttcccttctatattacttcaaaagttatcaaaacgctcaatctatctctcacctttacttacctcgcattaggctgtggaagagtctcttagaagtgtcaaccttttccacggaggagttgctgacaaacctgccgggaaatacagcggaggtatgaaaaggcggctgagtgtagccatttcacttatcggtaatcctaaggtacaccattgtctaagaatatctttgcttttaacaaccgtgacctttagaaatagtacatctagagagttaaggctctttcaagtttaacaaactcgtcctcatttatttcttacctttgaaaggtcgtttatatggatgagccaagcacagggcttgatccagcctcgagaaagaacctatggacagtcatcaagaacgcaaaaagacatactgcgataatcctcactactcattcaatggaagaagcagagtttctctgcgaccgactagggatttttgttgatggaaggttacaatgcatagggaacccaaaagaactaaagggaaggtatggtggatcttatgtgttaacaatgacaacatcatcagaacatgagaaagatgtggagatgttggttcaagaagtttccccaaatgtcaagaagatataccacatcgcaggaacacagaaatttgagattccaaaagacgaagttcggatctcggaagtgtttcaggtggtagaaaaggcaaagagcaatttcaaggtgtttgcttggggacttgctgacacaactctcgaagatgtttttattaaggttgctagaactgctcaagcctttaatgtcttctcttgaatcttcttaacgttgtcattttcttttctgttgaacgtcaatattcttttggtcaggtttgataaaattggccatgcatatatttgattaaatgtacattattagaataaatcggctgaaagttgtgatttctctgaggctattatatataagttgcttgtttatggatgattcatgttaaacaattttgtcttgttttgtaaactgtggctctataaattttagctgacatgatgatgttgatacaagagttgacgtgaatgcatacgagagaggaatttttggcttttatggttttggtgttaaaaggggacttgtctgtttgggtaaaaaaacaggacttctctgtttggtgagaagagagagatttcacagttattaagatacaatgtgatcctcaaattacgagcacaaactcttttgttaagttaagatacaaaatttacatccaagactatattcttacattcaacatattcagactattttaatgcaattgattttggataaaaacgcaacatccgaattgatatatcaaatggactaaatcgcaaaaataataatattggtcgtgatgtcatactacaatagcagctgagtatttcatttcacgaaaattacatctcagttcccaaagcatttgttaactttggacacttaaacgttgatagagatggacgtccttaaaacccatcaatatcaaaaatatttagtgatacctgacaataccatatttattggtcttgttatgatcactccttttcctaagcaacttgccaataaacccccaaaaaaatatttgcaactacagtaattggctctttatcaacacaaataatttcgagttggttgagacttgagaggctcgtgcactagggactttggggtagaaaaaaaaattcttattccagcagttgacagggtgataatcttgattttttttatggtctttcatgcccaaatgcaagtgccccacgaaacttcgcatacatatggtttacctcgttatcttcgttaaaaattactatctctgttcttttttgtttgattttctagaaaaaatatttgtttcaaaaagattatttttttaaattttttatgcaatatttattagttattgttaataaattgtaaattttaataaaaataattgaatatcattggtttaaaattatagaaaattgtaaaatacaaaaaataatacattttaaaattaactttaatatatattttaatataaacttttcctaaaaaataacaaaaataaaaaacatagggagtattaagtaacatccatgcatcctcaaccacataataattggcaagtcgtaataaaaacgtgtcacgtggatcttgttgtcacaaaatacattaaaaaacaaaggaaatataaaacagaaggaaaataccaaaatcaagaccagaagctttttatcagaaagaaaaaaaaaagcttcaacaatggcgaatcatgtccccgctagtttcttgacgagggctaatgctttgttcagaaaaaacttaacctaccaggtttgaccaaagaatacatgcatgtgttatctattgtatacaaaatctatttatgttaagttgatatatatagctagaatattctaatttatcaattggtttagaaacggaacatatggagtaatgttcggctcatcgtgattcctttctacctctgtgtgcttctagtggggattcaagtcttgtttgatacacaagttaataactctgctgataatcgatgtggttgtcgatgcatccacaaaaatggagatggaaaatgcgaaagaaagagttgtggtttacaatattcatctctaactcaagcctccttttgtgccttccctaaccctccaccgttgctcccgttgctacaaattccgcgtcctgaaactcgtttagttgatcctgcccgtagctcgtgcagacgaacaggatcttgtcctgtaactatacttgttactgggaataaccatacccttggagaaagtactatatatgccttttaaactttaagcaaatttataaagtgaattagtcttataggatcctaacagtttcgatactaatcttcacatttttttagctttatctcggaatcttctcagtacttctttcgcggtgaactcctctgaccatttcttgcgtaatctcgcctacaatgtcttggcaagtttttctccgccagaattttggtagttttcattgccatatttaagtctctatctaccagaatttatgatgaatttttatatccagggtacaatatcagaagcagactacaccaattatcttgatccagggattcactcagatcttcccattttccaaatccgaccttattgcactccaacaaccaacttgtcattctcatttcgacaaccacctatcacgtttcataaaggtactaagttcacaaaattatgttaggtgattatttttaaggtaccaatttgttttgtaaattaattacaacgtgtcactaaaaagcctagtggtaatatagtgaacataattaagatatgttgactttacttgagcaaattttctgtttaagtttaaatgcaatctgagtgcattccatgttgcaagttttattaaaaataatatttcttgggcatcactcaaagctagcttctggaaaacagtcttggagctgattaacttagttaatttgtcaaaccagaggtgagatgcgttcaaggattgaatctctggagaaataactcagtagaggtcaatgatgagatctttaagggctatcgtcaaggaaatcatgaagagatcatcaatgaggtcgctgcaggttattacacttctcttatcatatgtctctatttttttacttttgcaacttctgactctttctctggttttatattagcatacgatctcttggacactgataggaacaagttcaatgtgaccatctggtataactcttcttacaagggtaatttcaaagtacaagataggcgtgtaaagtatgtccgagtacctcgctcagtcaatatggtaagaaactgagtgcacattgttttgtacctaggacaagtcttttttttatgaaccatatactttgctatataactgtaggtttcgaatgcatatcttcggtttttgcgaggcccgggaacaaagatgttattcgactttgtgaaagaaatgcctaagcaagaaagtatgcttcgcgttgatatagcatctgtcattggccccattttcttaacatgggttattgttcttttgttccctgtaagtttaagtttgtgttcaatagactgcttcagtcttggaagaaaatttcttttatgatccaaattatatcatgtgatttaattactttgaggtattttctacgcaggtgatcttgaactcgttggtgtatgagaagcagcagcatctaagaattataatgaaaatgcatggcctaggagatggtccttattggatgataacctacgcttattttctcgccatatccacattatacattatatgtttgatgatatttgggtcagcaataggtacttgaatcattgatatatcttacttatgttatgtttttcttgtagaacaagtttcagagctatttctccttgtaggactgaagttcttccgctttaatgactacagcatccagttcattttctattttctctgcataaatctgcaaatctccatcgcctttctagtttcctcagcattttcaaaggttgagacagcatcaggtactaacttaagtcacacgttaactaaatgtagctcaagaacatgaaggtgttaattaaaaggaacactcattttgttttatggctcgactgtagttgcggcttacttatacgtgtttggatctgggctgttgggaggtttcctcttccagtttatgttggaaggtttatcgtttccaagtaagctatcaagaacaagttgaagaagacttattctcaaaagctgactacaatgttaattaatataatgtacgtttacttttccgcaggaggctggatttttgtcatggagttgtatcccggcttctctctatatcgtggattgtacgagttctctcagtatgctttgaagagacaattgaatgggagtgatggaatgaagtggaaatatttcagtgatagtgcaatggatgaagttttctacattattattattgagtggtttctcgcactcattgcagcatactatatggaccgagtttcttcatccgcgaaagacccttttttattcttgaaaaatctcatcaagaaatctccttctccacaaaggcatagcttgcagagactaggatcttctgtttccgtagaaatggagaaactagatgtcgttgaggaggtataacataatgattcacaatacatcatatgttctagttgttttgataaaaaaagaaatttattctaatcagagagcaaaagtcgagcagttgatgcttgagtcgagcacaagccatgcgattgtttgtgacaagctgaaaaaggtgtatcctggtagggatgggaacccacctaaaatggccgttggagggttatctatagctgtacctccaggcgaatgttttggcatgttaggccccaacggtgcagggaagacatcattcatcaatatggtgagtacataaatggatagaaaatcagttttgctgagcttcttattgaaaaactctcatgaataatacatatttttgttaggaaaaatagtggttaaaattaataggttttagactataaaacaattaacaatgaatggacatatgctcatatcttttatatgttagtgattaatcatctccatttttgttctggaatattccaaatatttatatgagtagatgactgggctagtgaaaccaacatctggaacagctcttgttgaaagtttggacatatgccaggatatggacaaagtatacactagcatgggtgtttgcccacaacacgagtaagtattcttgaaaacatttgaatctattccattgtatatgtgtcatcattctcttgtttctgttgtgtgctagcttgctatgggaaacactaacaggaagggaacatttgctcttttacggaagacttaagaatctcaaaggctctgatctcaaccaagtatgttatcatcttacttgtttcctacattaatactccaaaagtatcaaaacgttaactcatggttactaggctatagaagagtctcttaagagtgtgaacctatcacgcgaaggggttgctgataaacctgctgggaaatatagtggaggcatgaaaaggcgactaagtgtagctatttcacttattggaagtcctaaggtacaccattttctcttatggctaacccttaattcatatgatttaattagaaagctagctttaacaaatatattttttacatttggcttaattctttaaaaggtggtttatatggatgagccaagcacaggacttgatccagcttcaagaaggagcctatggacagctatcaaaggcgcaaaaaaacacactgcaataattctcactactcactcaatggaagaagcagagtttctctgcgacagattaggcatttttgtagacggaaggttacaatgcgtagggaatccaaaagagctaaaggcaaggtatggtggatcttatgtgttaacaatgacaacatcatcagaacatgaaaaagatgtggagatgttaattcaagatgtttctccaaacgccaagaaaatatatcacatcgcagggacacaaaaatttgagatcccaaaagacgaagttcggatcgcagaattgtttcaagctgtggagaaggcaaaaggaaattttagggtgtttgcttggggacttgcagacacaactcttgaagatgttttcattaaggttgctagaactgctcaggcctctaatgtcttctcatgaattacattatcatttttttatttgttcaaagtcaatatttgattgttcatgtttgatcaaattgaccatgcataggtttgattcatgtatattatcgtaataaatcgttttcaaggttgtaaatttctttgaggttcttataacttgtttatttgtagatgatttatgtataacaaattaagtaaattcctacaaaaagagaacaacgacacggagatgttagctcacttggttacatatggtatttcaattatttacagtttgcaccattattcttaaacatatggtagatcatttggttaaagttacgttgtacccaatatataattaaacaatatacggtaagcgtatatctcacagcattgtttaactttggacacttgacgttatagagatcgacgtcgttctaacgaaaaggccctatagtcaactaaattctttagatcgtaagatcttcattattttatcatcattatgtaacgtgattacgtacagatacgagaacatattttcccataaaaaattcacgtctccccgtaatcttacagtaataattaacattataaattattctttgtaaaataaacagctcattctccacataggttgaagaatttataggtcgtgggatcattcatttacttggaaactttcttgtaaaactacttggaattatttttctttgtcgacacacttaattgaagatttcgttggttgaaattacaagtaacaaatcattaataccataattcatggacacaactttaaaaaatgcacactagtggaaataaaagcgtgtcatatggatcttattgtgaattcatcaggacccaaaacaaaaggaaagataacacagaaaaacaaacaaaatcaagattacaagattaagcttcatcaatggggaatcatgttcccgcgggtttctttacgcaggctaattccttgtttagaaagaacttaacatatcaggtttggccaaacaattcatgtgttatattttaagaataatggtgcaaataattacttgatacaaaatccattgtaaaatgtaattatatcttctttttttttttggtttaaaatgtaattatatcttgatactaaatatccataattggtttagaaacggaacatatggagcaacgttcggctcatcgtgatccctttctacctctgcgtactgctagttggcattcaagtcttgttcgatacacaagttaataactctgctgataatcgatgtggttgtcgatgcatcgacaaaaatggagatggtaaatgcggacaaaagagttgcggtttacaatattcgtctcaaaaccaagccttcttttgtgctttccccaaccctccaccattgctcccgttgttacatattccgcgtcctgaaactcgttcttctgatcgtgaccgtgactcgtgcagacaaactggatcttgtcctgtcactatacttcttactggaaataaccattcccttggaacaagtatgcctcttttattctaatttatttacatacacattgttacacaatttgaatttggtgtaaggcaagccaatggaccgccgaccttaaattttgaacttcttggaacataggaaagagtaatattactaatgagaggacgtaagctgagtatatttagctaagaccatctccaacgtattcctccattatttactctaaaattgaccactcatgtcggtgatcaataatatgcacaatgtccattattgttgttttctctcgattgaactaatcttcactattttttagctatatctcggaatcttctcagtacatctttcgcgatgaactcctctgatcttttcttgcgtaatctagcctataatgtcttggcaagtatccaatatctaattgtttccattatcatttaagtctttatctctcaggactgatcatgaataaatatgtattcagggtactacatcaaaggcagactacaccaattatcttgatccagggattctctcagatcttcccatcttcaacgtccaacctcggtgcactccagacactacaacattctcattccccttccgacaatcacctctcgagtttcataaaggtattaagttcacaacgattctaggaatttttagaaggtaatacattacttacatttttcacagaaaattatatatatgattttctaaataccaaattgtatacaaaataaaataggctaaataaaacagtctgctaacaatattgttacgataaatttttttattaattttgcggaaaaaactttattggtttaacaagttaaaaatagaagtttttaatcacaacaaattttattattagctatattgatggcgcatgacaaacatctagtattttagttaacaaaaaaaaaaatctagtatcttaaatatactaaagtaaacatatgatatgtagatttttacttgagcagttcaaatgtaatctgactgcattacatgttcacacttcatttgttaaaaagaatatttcttgcgcctcactcaaagctagcttctgagaaaacattcttgtagctgattaccttaatggctaatgtgtcaaagcagaggtgcgatgcgttgaaggattgaatctctggcgaaacaactccatagagattagcaatgagatcttcaagggatatcgacaaggaaatctcgaggagatcatcaacgaggtcgctgcaggttactccacttctcttatcaattatcatttttctctgtgtttacaatgcaacttctaactactattagtttattgtgtgtggttctttagcatatgatctcatggataccgatataaacaacttcaatgtgaccatttggtacaactctacatacaagggagatttacgagataggcgtgtaaagtatgtccgagttccgcgctcagtaaatttggtgagaaactaagtcattcaagacattctcaattgttttatacctagttaagactggtctcttgatcataaaactcttgaaaaaatatgcaggtttcgaatgcttatcttgagtttttgcaaggctcagggacaaagatgttattcgattttgtgaaagaaatgccaaaacaagaaactaggctccgactggaaatggcgtctctcattggccctattttcttcacatgggttattctccttctgttcccggtaagtttgttttcactagactgattcaggcttttacaagtatatattggtagaagtttttcctagtatgatcaagatcctacaacatgcatgggatttcagtagttagaggtattttctatgcaggtgatgttaacctcattggtgtatgagaagcagcagcatttaagaattataatgaaaatgcatggcctaggagatggtccttattggatgataacctatgcctattttctcgccatatccatagtatacattatatgcttgatgatatttgggtcagcaataggtacttgaatcattgacatatcttacttatgttatatttttttcttatagaacaagtttcagagctatttctccttgtaggactgaagttcttccggtttaatgactacagcatccagttcattttctattttctctgcataaatctacaaatctccatcgcctttctagtttcctcagcattttcaaagattgagacagcatcaggtactaacttaagtcacacgttaactaaatgtatctcaagataaaggatgttaattaaaagaaatactccttgttttatgtctcaaatgtagttgctgcttacctatatgtgtttggatctgggctcttgggcgcgtttctcttccagtttctgttggaaggtttatcatttcctagtaagatatcaagaacaacttgaagagacatattctcaaaagctaaccatattgctaataacgtctttacattttcctagggagttggatatatatcatggagttgtatccgggcttctctttatatcgtgggttgtatgagttctcacagtacgcatttaagagaaacttgaatggaagtggtggaatgaagtggaaggatttcaatgatagtgcaatggaggaaattttctacatcattatcgtcgagtggtttgttgcactcattgcagcttactatactgataagatatcttcatcgggaatagaccctttctttttcttgaaaaaccaaaaccctttcaagaaatctccttctccatatggcttgcaaagacaagtctccgctattgccatagaaatggaaaaattagatgttgcacatgaggtattgcaaaacgtttcacaattgtttttcgtttatgtagctattttgcttaagagatttgtttcaatcagagagtcaaagttgagcagttaatgcttgagacgagcacaggccatgcgattgtatgtgacaatctgaagaaggtgtatccatgtagggatgggaacccacaaaaaatggcagttcgcggattatctcttgcagtgccttcaggagaatgctttggcatgttagggcccaatggtgccggaaaaacctccttcatcaatatggtctaaacacaaactgaataataattagaaatgtgtggattagtccatattacaaatatatcattagggctcatctcacttccaatgtgagataatcctaacaaagttgatatattgtatttttcttcagatgactgggcttatgaaaccaacgtctggggcagcctttgttcatggtttggatatatgcaaggacatggacattgtatacaccagcattggtgtttgtccacagcatgagtaattgattttattcttgaaaacattttagtatggttcttgtatatagatatagttgttcatcattctcttattgtatgtactatatatactagcttgctctgggaaacgctgacaggaagggaacatttgctcttttatgggagactaaagaatctcaaaggctctgatctcgaccaagtatatatgttatcaatcttactaattgtttcctatatcactccaaaagcatcaaaatgtttattcatggttattaggccgtagaagaatctcttaagagtgtgaacctatttcgtggtggagttgctgataaacctgctgggaaatatagtggaggcatgaaaaggagactaagcgtagcaatttcacttattgggagtcctaaggtacaccattttctcttactactaatatcttggtattcagagagccttttaacaaatccaattttatatttggtttatgtgtttttaaaaggtggtttatatggatgagccaagcacaggacttgatccggcttcaagaaggagcttatggacagccatcaaacgtgcaaaaaaccacactgcgataatcctcacgactcactcaatggaagaagcagagtttctatgtgaccgattaggcatttttgtagacggaaggttacaatgcgtagggaatccaaaagagctaaaggcaaggtatggtggatcttatgttttaactatgacaacaccatcggaacatgaaaaggatgtggagatgttggttcaagatgtttctccaaacgccaagaaaatatatcacatcgcagggacacaaaaatttgagataccaaaagaggaagttcggatctcggaagtgtttcaggcggtggagaaggcaaaggacaattttagggtgtttgcttggggacttgcagacacaactcttgaagacgttttcattaaggttgctagaactgctcaggcctctaatgtcttctcttgaatcttctttagattatcagtttttgtagctgttcaacgtcaatatttgattgttcgaactcatgaattacgataatgttgcaaatgcataagagtaaagaaaatgaatgatgatgttgatacattaaaatagagatgatgcccatgcataagagtaaagaaaatgtttttcttctttttgaattattagtgcaaacaaaattacacagttttgaagctgaaaaacagtatagcagattgatggtaaaacatgatccctcagtgacggcgaaaactcctgatttgtttattttgacgcaaagtgatgaatttacataaaatatgacgtgatttaaacaaggaagatataagtatttctcaatcacaataatgttttacttttatcacttaacgttagagatggacgtgattctaacgataagtcaatgaaattacccgacaatatgtataatagattcgtgacatatttatagttttaccctacttgatcatgtgtccccattttttactaaactttataaattctaaaagaaaaaaaaaaaaaaaaaaaaaaaactcattctgcacacatagttaatggcctcaaccaccacattatagaatttgactgcagggatcactccttgacttgatcatgtgtccccataaatcttattgaagttcttcgttagttgacattataagtaacagaagatagttaatgccttaatgcatggatcttactgtgaattcatcaggactcaatggcactaaatctaaaacaaaaggaaagataatagagaagaaaaggacaaatcacggttgccaaagcttatcatcaatgccgaaccatgttaccgcaagtttcttgacacgggccaatgccatgttcagaataatcttaacctaatagtttcttggcatggactagtccactcattatatgtttgtataacttgtttgtttgtggaggatttatgtaagacttgtgagtattttttcacagcaatgtaagtttggactcataacgtttagagttagagatcaacattgatataacgaacatgccctatagtcaacgaaattatccgacaattaatatacttaatttagactcgtaagatatatacatatcatcacgttgcgtgatacgtacgagaccacgtttccgcaaaatctagtaggaaataacattctaagttattttatgtaagaaacaacaactcacccgccacacataagaattttgttggtcgtcccgtcgtgggattactcctttccatggcaacttattatacatattataattgaagtcccttgttcgttaaaatgcaaagtaattaatttcaaagcatttataattcacaagtggaaataaaaacgtggcatgcatatagatcgaattgtaaactcatagagtcaaatcaggactcatcaatggcgaaacctgttgccgccagtttcttgacgcaggccaatgcattgttcaagaaaaacttaacttatcaggtttggccaaataatatacatgtgttatctatatatacgtggaaaaaatgtaattatatcttgttaccattgttgtagaaacggaacatatggagcaacgtaaggctgatcgtgatccccttgtacctctgtgtggttctagtatgcattcaagctgtgttcgattcactggttaacaactctgttgataatcaatgtggttgtcgatgcgccgacgacgacaaaaatggagatggcaaatgcgaaataaaaagttgtggtttacaatattcatctcaaaaccaagccgtcttttgtgctttccctaaccctccaccgttgcttcctttgttacatattcctccttctgttaatcgtgactcgtgccaacgaaccggatcttgtccagtaaccatacttgttactggaaataaccaatcccttggaacaagtatacatactttccctctttaatttccatgtttttttggatatatatatctatgactatagaataaattcttgttgccttcctaactaatcttcactattgttagctttatctgagaatctgcttagtacttctttcacagtcaactcctcttctgaccttttcttgcgtaatctcgcctataatgtcttggcaagtccttctctgtttgaactctgattgtttccattattatcaaagtctctatgtctctcgggacttatctcatgaatatatatgtatttgcagagcacaacatcagagacagactataccaattatcgtgatccagggatttactcagatcttcccattttcaacatccaaccccagtgcaccccagccactattttgtcattgtcattccgacaaccacctctcgagtttcataaaggtattaagttcacaaaattatgtgtgaaaccctagaaaccataaactgaacactaaacccacaatggtgtatatatatgaaccctaaccaagtgtcgttatttcaactagttaggcgaagcttagaggtctgacgattcgagtgacgcttgagacgaaactaatattacatgttgtgttttcgggtctaggagattacgggatttggtctaaaacttcctaattttccaaaaataaaaaaattaaaacccttattaatataagttttaatgtaattttgtaagaaacaaaattcttggagctgattgatttaatggttaatgtgtcaaaaccagaggtgagatgcgttcaaggattgaatctttggagaaacaactccttagaggttaacgatgagatctttaagggctttcgaaaagaaaaccatgaagagatcatcaatgaggttgctgcaggttatcccctacttcacttatcctttgtctctgtgttttacatatgcaacttctgactatttctcttgttttatcagcatatgatctcttgaacaccgataggaacaaattcaatgtgaccatctggtattacacgacatacaagggagatttacaagattggcgtgtaaagtatgtcagagttcctcgctcagtcaatatggtaagaaactaataagtgttgtatgttaggattctatattatattgaaatcgttaaggaaccaacactaagataaataacattggtcgtcactctatacctaggaatggtcttttgatcaaacccattcttagactcggcaacataaatgcaggtttcgaatgcttatcttcagtttttgcgaggcccagggacaaagatattattcgactttgttaaagaaatgcctaaacaagaaactaggcttcgcatggacatggcgtctctcattggccccattttcttcacttgggttattcttcttctgttccctgtaagttcctttaatgtggagtgtggactacttcattctcttacaagtatacgatgattcctaaaacttggaagccgtttggtcattatatgattaaaaccctatcatgggaactaatttaccctgcaatggtctgcgaactcgaagagtgtatggacctaatccttgattaataggccttttcaatagttacacccatttttatatgtaggtgattttgacctcattggtctatgagaagcagcagcgtctaagaattataatgaaaatgcatggcctaggagatgctccatattggatgatttcctacgcatattttctagccatatctactttatacattgtatgcttgatgatatttggatcagcaataggtaatcattgccgtatcttatgttattattttcttatgtatatatagaacaagttacaaagctatatagtttgttacaggactgaagttcttccggttcaatgactacaccatccagtttatgttctattttctttatataaatctgcaaatatccatagcctttctagtttcctcagcattttcaaaggctgtgacagcatcaggtacgtactaaatgaagtcacatttttcaaatttggtcaagaacatgttggtgttaaaaagaaacactttctgttttattcccaaattgtagttgttgcttacatatacgtgtttggatctgggctcttgggcgcattcctcttccagtttctgatagaaagtttatcgtttcctagtaagctatcaataacaacttgaagataacatattctcaaaacagaccacaatgctactatatataatcttttactttttaccaggacgttggatttttgtcatggaattgtatcccggcttctcattataccgcgggttgtatgaattctcccaatatgctttccaaagaaacttgaatgggagggatgggatgaagtggaaagatttcagaggtagtgcaatggatgaagttttcaccatcattatcgttgagtgggttgtcgcactcgttgcaacatactatatagaccgagtttcttcatcgtcaaaagacacttttgcattcttgaaaaaccctttcaagttatctcctactccacaaatgcttagctttcaaaaagagagatctgatgtttccgtagaaatggagaaacttgatgtcattcaggaggtattgaagaagaactcaccacccattccatgttctttgcgtttttcgagttgttttgataaataaattttgttcaaatcagaaagaaacggtcaagcagttgatatttgagcggagcaaaaatcatgggattgtatgtgacaacttgaagaaggtgtatcaaggcagagatgggaacccacctaaattggcagtttgtggcttatctctcgctgtgccgtcaggagaatgtttcggcatgttagggccgaatggcgccggaaagacctcgttcatcaacatggttagtacacaaagggacatatatacaaatcttttgtgcttagtttttttttattaaaattttgtctagcatactcataagtaacaaattaagcattcattttttttttggctagatgactggactcgtgaaaccatcatcagggtcagcttttgttcaaggtttggacatatgcaaggatatggacaaagtctacattagcatgggtgtttgcccacagcacgagtaacaaattaaattcttgtaacatatttgttgttgttgaatgaagatcattattaagtttacgtgtttcctaacaatcatatagttattttattgttctcttatagtcttattgttcgtcattgaccagcttgctctgggaaacactgacagggaaagaacatcttctcttttatggaagacttaagaatctcaaaggccatgatctcaaccaagtatgttatcattatcaatcttacttctatcttatattagtgcaagagtcttaaacgtcaattcatggttaaatattaggccgtagaagaatcactaaagagtgtgaacctatttcatggaggagttgctgatatacctgccgggaaatatagcggaggaatgaaaaggcggcttagcgtagccatttcacttatcgggagtcctaaggtacaaaattgtatcttactcatctcctaacaaaaaacttattgaagcccttatttgaatgtgatttagagagctaaagtttttcaagctttaacaattatttttggtttttatattaaataaaaggttgtttatatggatgagccaagcacaggacttgatcctgcttcaagaataaacctatggacagtcatcaaacgcgcaaaaaaacacgcagcgataatcctaacgactcattcaatggaagaagcagagtttctctgtgaccgattgggaatttttgttgatggaaggttacaatgcatagggaacccaaaagagctgaagggcaggtatggtggatcctatgtgttaacgattacaacatcaccagaacatgaaaaagatgtggagacattggttcaagaagtttcctcaaatgcaagaaagatatatcacatcgcagggactcagaagtttgagttcccaaaggaggaggttcgaatttcagaagtctttcaggccgtggagaatgcgaaacgcaatttcactgtatttgcttggggatttgcggacacaactcttgaagatgttttcatcaaggttgctaaaaccggcctttaactaatgtcttcttttgaatacttttaagattattagttatgtctgttccacgtcaatattttgcttgttcatgtttgataaattgataatgcagaggtttgattcatgtacattgttggctcttcgcctgcaagtttgcgaattagtctgaggtcttgtattagtttgtttgtggatgatgcatgtaaccacaatttttttatttaaacgtggctatatttaattgtggataaaccactgaatatgaaattttatttcatctaccattcagatcctaaatgtatatcttaccatttaattcatatagggtttacgatttaaaatttagaatttcgaaaatagtatctatattaaaagatagtaattaggtctttttttcattgaattttacttaaacattggtaaaatttcatatgccatcgaaaaaagaaaatatcactgaaaactatgttagctgccggagacaacatttctaaaaagaaagacaatttttaaaaaagactacaaaatactctgttgttcctttttgtttgattgtttagaaaaaaaatttgtttttaagaaattaattttttaagttttccatgcaatatttattggttaatattggtgaattgtaattttcaagaaaaatagttagttatcattggtttagagttataaaaaattgtaaaacactaaaaataatacatttataatcaaaatttaatatgttttcttaatatatgtgtttttctaaacaatataaaaaaaggaacagagggagtataaatcaaaactgttaaaccaaattttttaccaattaaatcttaattatatcaattggttcttctccgaaataagaaattgtcttgatgtctatgaaaatcacaaatttcactaaaaatttatggaggattcctaattaactttagaccaggaatttttcaaaaaataaatttaaagatgacattatcatgaacacattcaaactgaaatcaaaccaaagtaaatttattttccctgtaatggaccatagagtataaagtatttaaaactgctacttattaaatcaaagacttttgtgttttttattgtgtgcaaagactttttatgtttgaaaactgaaataagactgctagtaaaaatataaactgaaataagaatttttcttaggacatcataacatttttgcttcttgtccaagtaactgccacattggaaaaaaatgtttagatttgaacaaatctttttaaaatggtcaaaaaattatcatagtcaaccaaattacccgacacttttacgtgagacattaaaatagactagtttaatcgattatgttcacacgtgattacgtctgagatgacgtatgaatcatctttatacaaatacaaatatacagtaaacaaataattgaaactcacctcttccactagtcgaagaatctattggtcgtggcatcactctccttcgcagcttcctaccaaatttacattgaaaatattctccattgtcactttctcgatttcgtaaaattacctttttgttatttgaccaaaagaataaccccaaaaaaacaatactaatatattcgagaaaaataactaattaaaggtatacttaacgagaaattaaagcgtgtgcacaagggtattactgtaatttcacattccgtatctgatctctgttcttctttcctccgcctgctataaaccaaaaggcggtgactcgatttgttccttctaagttcaaaaattgggtttccattaggattcaatttttactaaccctaaaaaacagaatctaatacacagagaaaagcgaaggttgttaccttcatcaatggcggatcctggtcctgccagtttctcaacgagagccaatgccttgcttaggaaaaacttaacctatcaggtactttttccgttttcttttcctctacgcaatccaattatacacatacaaattttcgtttaatgtgagtaagattctgttctgggattttcgtttaatagatcagtttccacaacaaaattagtggctgatttattgagtagattctgttctaattatgtctttgtgtaaattgtgtgttggtgtagaaacggaatctatggagcaatatacggctaatcatgatcccattctacctctgtatacttctagtgattatacaaatcctgttcgatacacaagttaacaactctgctgataatcgttgtggttgtgaatgcatcgaaagaaatagagctggaaaatgccaaagagagctttgcggtttagaacattctaaaccggatcaagccttcttttgttctatccctcgtcctccactatggcctcctttgttacaaatcccgcgtcctgagagtcgcgatgttagaggtcttcgtgatgattcttgcagaagaacaggatcttgtcctgttactatactctttactggaaataaccgttcccttggaacaagtatgtctcttttccttcttttttatgtttctgttcttgtgtacctacactggaacttatcttcatgttttctttagctgtatctgagaatctgttcactagttctgtgtcggcgaacgcctctgagattttgcgtactttagccaacaatgttttggtaagtttttttggttggtttctgtttgtttccattatgaaatgtgtttcttagctttcttgacctcatgtttcagggtacaacagttgaggcagatttcaccaattatcttgatccagggattgcctcaaatctttccatctacaatatccaacctcggtgcattctaaatgctacgtttccgttctcattcgaacaaccacctctcaagtttgagaaaggtattgagtttttaatcccattgatgtttaagatgtcaactaaaaaagtttaagagggatactagatgttatatatgcttatatcagtgttagcttaatgaaatctggttgctttctctgttttcgtatcccgatcttgttgaacatgatatatctttctgcaatatattgtcctcactcatagttatctttcatggaaacatcgttgtagttgattaacttaatgtttgtgacaaaaccagagttgagatgtgttcaaggatcaaatctttggacaaatacctccaaagaggtcaatgataagattttcaagggttataagaaaggaaaccccgagggaaagataaatgagatcgctgcaggttcgtcaacttctcagttgggttatctataataatctttaataagctcatgagatttctgactcttcatgtctgattttgttgttggtttagcatatgatctcttgaacactgataggaacaattttaatgtgcacatctggtataattcaacgtacaaggacgatgcaggaaatagacttataaagttgatccgtgttccccgctcagtcaatttggtaagaaaacaacaatttactcaagacatccttcatcattgtattctcactttgctctttaccatgtagcaccactttctttattgaaccgatgcttacactttaccaaactgcaggtgtcaaatgcttaccttcaatttctacaaggaccggggacaaggatgttgtttgaatatgtcaaagaaatgcctaaaccagaaacaagtcttcgtctggacattgcgtctctaattggcccccttttcttcacctgggttattcttcttctgttccctgtaagtttgccttcaataatactcaccctcatggataaatcttggaaacaacaagaattctgctttctccaagcgtaagatacgaaattcatatctagagccatttgtatgcaggtgatcttgtcgtcattagtgtatgagaaacagcaacatctaagaattataatgaaaatgcatggcctaggagatggtccttattggatgatttcctacgcctatttccttaccatatccgtgttatacgttatatgcctgatgatattcgggtcagcaataggtaattgaagcctttcggttaatacatttcttacaatacattatgtttttttgtcaatatgagtctttaatgttgttggttccctgcaggactgaagttctttcggcttaattcctacagcatccagttcgtattctattttctctatttaaatctgcaaatcgcccttgcctttctagtttcttcagtattttcaaaagtcaagacatcaacaggtactaagaacatcgtgcttcttgaatttaatcaagaacatgctactggggtttaaaggaactaatgagcttttctctatatgtcttaatcatagttgcttcttacatatacgtgtttggatctggacttttgggtttgtttctactcaactttctgattgaagattcatcattccctagtaagttattatgattaattaacttcaagaaagatatttaatacactctgttatgtgttttcacaactgaccacgattgcaaatgaattataattttccaggaggctggattattgtcatggagttatatcctggcttctccttataccgtggcctgtatgagttggcgcaatttgctttccggggaaacttgagaggggaagatgggatgaagtggaaagattttggtgatagtgcaatggatgatgttttttacatcattgtcgttgaatggtttcttgcactcattgcagcatactatatcgataagatatcttcatccggaagaaacccgttgttcttcttgcaaaaccctttcaagaaatctccttctttgagaagacctagtttgcagaggcaaggctccaaagtctcagttgatatggaaaaaccagatgttactcacgaggtatgtccaaagactttacaatatatttcatgtttttcataatatatactggttctgataacaaaaaatgttccaatcagagtaaaaaagtcgagcggttgatgcttgagtcgagcacaagccatgcgattgtatgtgacaacctgaagaaggtgtatcctggtagagatgggaacccgcctaaattggcagttcgtgggttatctcttgcagtgccttcaggagaatgcttcggcatgttaggtcccaatggtgctggaaagacttccttcatcaatatggtcagtcaaatggacaaaatattttgtgcacattagaccttagcttccaatatcattgctgatcgagaaactctatctagtgtatgcccaaacgaattgtgcgtcagccttagtaatatgtcctttgttttctttgtcagatgactgggctcctgaaaccgacatctgggacagcacttgttcaaggtttggatatatgcaatgatatggacagagtgtacaccagcatgggcgtatgcccgcagcatgagtaattaaattcttgaaattcatttcattttgttcttcactatagatgatatagttgtttaatcattctcttattgtctgtcgtataccagtttgctatgggaaacactgacaggaagggaacatctgctgttttatgggagacttaagaatctcaaaggcgctgatctcaaccaagtatgttatcaatctcgctcaccttctatattacttccattgctcaatctatttctcatcgttacttatctgcatcaggctgtggaagagtctcttaagagtgtcaaccttttccatggaggagttgcggacaagcctgctgggaaatatagcggaggtatgaaaagacggctgagcgtagccatttcacttatcgggaatcctaaggtacaacactaagcctttaaaaatagtaaaccaaaagggataagctctttcaagcttaccagactcgtcctcatttcctttgaaggtggtttatatggatgagccaagtacaggacttgatccagcttcgagaaagaacctatggactgtcatcaagcgtgcaaaacaaaacaccgcgataatcctcacaacccactcaatggaagaagcagaatttctatgtgaccgattgggtatttttgtggacggaggcttgcaatgcattggcaacccaaaagagctgaagggaaggtacggtggatcttatgtgtttacgatgacaacatcttcagaacacgagcaaaacgtggagaagctaattaaagatgtctccccaaacgccaagaagatatatcacatcgcagggactcagaagtttgagcttccaaaagaagaggttcggatctcagaggtgttccaggctgtggagaaggcgaagagcaactttaccgttttcgcttggggactcgccgacacaactcttgaagatgtcttcatcaaggttgtgagaaacggtcaggcctttaatgtcttctcttgatcttcttagattcatacgtccatattttgtccaatgtcaatatttgcttattatgtcaaattgctaccacatgatacgaaattagtgtttataagatttcatgtatattactggaaatatgttacaagttcctgatttttcaatgagattatacttgaaacaattactagcgctcctgaagcaaagaggcgacacttcaacactaggagatgtttttcaatgtcataaccatttgttctactctgtttcggagttcatgtatcggctattaaagttggttggtagcaataaacccatattttcgacattgtcgtaataatgaaaataaaaaaccatatctatcttattatattcatatttgtgtaggttttggtagagagttcatttcttaggtgagtgatgcaaatgaatactattacttgacctacacgaaatatcatacaaaaaatcacagtgctattgtccaatacctgtatgccacttcagtaacgtgtatagttaaactgttatctcttaattcttgttatttttagtgtgcacatctaaaaaacaacatttagagacttcttaaaaactattcaactccatcaaaccttctcatattctctgcgatggcggattctagtcctgcaagtttcttgactcaagccgacgctttactgaggaagaatttagttttccaggtttcaatacacttttaatatctaaaacggctaagacagagtaaaaagtttacaatgaggttttgtttccttttgttctttgatgcagaaacggaacatatggagcaacatacgactcatcacaatccctttctttctctgtttacttctccttgttattcaaatgctcttcgacactcaattcaacgacgtccatggtcaatgtggctgcaacgagaaaacttgcggcttaaggtattcgacttcagagcaagcagctttttgtgccattcctaatccaccacaatggactccactacttcagatcccggctcctgaataccgagccgcgatcccatacccgagccatacttcccctgcaacttttctcttcaccgggaataatcagtcgctcggaaatagtatataaaccctatcaatctactcctttgagatgtgaaatttttatatgtaactctttttctatggtcaacaaattttttcttttgctagttctaatgggaaatatgtatagcaattcatctggatttgatggagatttagcctattatgtcttggtaagtttcatgaaacaatgttacatcatgaatatgtttttgtgtgtttctcagtctctgatttctaatatatatatgcagggctcatcatctttccctgcatacaccaatcatatggactccgctttcatctcagatcttcccatctacaacatccaacatgaatgctcaccaaactcttctttctcaatcttaattcaccaatcacctcttgctttccctaaaggtctaacaaaaacaaattccaatttacaatatcaaaatgttgaatgttttcttttaaaaacagaggatttctttcttttgtctagaggtaaactgtgtccaaggcttaaatttgtggcggaatagttcttcggatgtgaacaacgagcttttcaagggttaccgaaaaggaaatccagacaagaagatcaatgagtttgctggaggtctctcaacatcatctcatctcatctcacttctttaaaataaagttgtgtgtcttaactttctcttctatagcttttgattttcagaacacaaatgggaacaatctcaatgttagtgtttggtacaactccacctacaagaacgatacagtggttcgaccgatggctctgatacgagtccctcgcttagttaatctggtgcattttgtgcttaacccttttacttaaacatagattttattatttagtacacaatcttgagttcatttttttttttttgtttctgtaatttttcaggcatctaatgcatatcttgagttcctaaaaggttctgagacaaagatactctttgagtatgtcaaggaaatgcctaaaccagagactaaactgagcttagacatcgcctctctaatcggcccgctcttcttcacatgggtcattctgttgttatttcctgtaagtctttagattatctaactgaaagattttaaaaacattcctcatgtcggctttaaacgtagttttcctctggatcatattataggtgatcttaacaacactggtgtatgagaaacaacagaggttaagaatcatgatgaaaatgcatggacttggagatgttccttactggatagtttcatacacttattttctcttgatatcgattctctacatgttgtgctttgcgatattcggttcactcatcggtaataatagcaaaaccttgctaatgtatttttatgttctttctcagttcttgatgcttttactttttctacagggttaaacttctttaggcttaatgactatagtatccaacttgtgttcttcttcatatgcataaatcttcaaatatcagtcgcctttttagcatctgcaatgttttcagatgttaaaattgctacaggtactgtaccatcacggctttggttcaagatttgttaaaatgatagtcacagttgttacattttcatttgagagtttcagttatagcatacatatatgtctttggaaccgggcttctaggaatctttcttttccaattcttcttggaagatcctctcttcccaagtaagttcttaaaaccgaatcaaaagttttgctagatttattatgattcatgtgatttttctctaggaggatggataatagcaatggagttataccctggattttctttataccgcgggctatatgagttatcacaatctgcgtttgcgggtgattaccgcgggattgatggaatgaaatggagagattttggtaatggaatgaaagaagtgacctgtatcatgctcattgagtggctgttactgcttggtttagcatattacattgatcaaatcatttactccaggaaacatccattgttcttcctcctacaaagcacttccaagaagaaacaacacttctctgacaacaaaatatccaaagttgttgtagagatggaaaagccagatgtgtgtcgagaggtaatgaaaaatacaatatgaagataagtttcattattgacaaggctaagtaagatttgcatgcatcttttttggtgtcagagggagaaagtagagcagtgtctacttaaatcaactagagactctgcggttttatgcaataatctcaagaaggtgtactcgggtaaggacggtaatcctcagaagctcgcggttagaggattatctcttgctttacctcaaggagaatgctttggcatgcttggtcctaatggagcaggcaaaacctctttcatcaacatggtccgtataaacaatatcatacctattgatcttttgtctaatgagtcaatcctcaatcttctagtcaacctctttgacattctaatgttctgtgtagatgacaggaatcatcaaaccatcgtctggcacagcatttgtccaaggtcttgacatactaaccgatatggaccggatatatacaacaattggagtctgtccacaacatgagtaatctataaatataacaatctctgtttctttctttactttaaggctgccttgtttcttagtccattactccatttcattgaaatttctgcagtcttctgtgggagaagttgagtggaagggaacatctactgttctatggaaggctcaagaatctcaaaggttctgtcttaacacaagtaagtgtttgttttaacttttaacgtggtcggtttgtgaatggcttatgcaaaaactgatgagtttttaggctgtcgaagagtcgcttcgcagtgtcaaccttttccatggagggattggtgacaaacaagtcagtaaatacagtggagggatgaagagacggctcagcgtcgctatttctcttataggaagccccaaagtaacttgaaacatctcttggtatctatgttctatgatatgtaataagcctaatttgaggaaatttgtcaaggttgtttacatggatgagccaagtaccgggctagatccagcctcgaggaagagcttatgggatgtagtgaaacgggctaagcgaaaaggggcgataatactcaccagtagagtcttctaagcatcttatctcctttttgttctgccttataatgttttcatacacaagaaaacttcagctttggtcttatgcttcagcacattcaatggaagaagctgaaattttgtgtgaccgtataggaattttcgtcgatggtagtttgcaatgcattggcaatccaaaggaggtaaaactacaatacaccttatactcaatcgttagaaacagagtataacagtatgaacttgagccaatattaactgaaacattaatgacagttgaagagtcgatatggaggatcctatgtattgactgtgacaacctcggaggaacatgagaaagaagtagagcaattagtgcataacatctctacgaatgcaaagaagatatatcgaaccgcggggactcagaagtttgagctgccaaagcaagaggtgaagattggtgaggtgtttaaggctttggagaaggcgaagacaatgtttccagtagttgcttggggacttgcagacacaactcttgaagatgtctttataaaggttgctcaaacttcttaactaacaactcttttgaatgattccttcagatcaatctcaatcttttctatatcttatgtcaagctcaaaatcacaaactatatttcatataactctctctagccacttatgctcttaagaaaatcatttatttccgtaaatagttaatacgagctttcgagtctaaaaagggaaacaatggatagacttcatttagacgtaattttattccacaaataataaagagtctcttaatcttatccctttattctcgctttctttactctgcttttgctcctatcctattcctatgctttgtctattcttactttttcgaccaaactaaaaaaattactgtgtcaaatcttctttctaaaggataatgagacaaaattactttttcgaaatcttcttttaaaaggataatgagacaaattacttgttggaagagtgactaaaataggatttgcaggagctaagttctaaaagtgaatagtagaaatcaaatgtacaaaacaaaacgtacaccaaagaattaggggcataactctccaatgttatatcatggttaaaattttcaacgagtggtttccaatataaactaatttactggtctaattctacaatttagattattccttttttggtcaaacctacaatttaatgtactatagtcttttcaagcaagagaatttagctcgaatcaaattcaagaaactcacccaccagaagagagaaaaatcaaagtagtctactttttgcaagttggtccgtgggtgggtgcatttaagaacgagggacattgttcgtgaccacgagagcacgcacgcataccaaaactcaatgaaatgacaaaagacatataaacaagagagaaaaatgtatacacacaaatagaataacaactattcgtgaaagatagaatagaaaaattcaaaatatacaccttaaatttcatgtttctacccacaaaaaaaaagaatgtagaacattcaaaaacttatttttttgtatatttctgttaaaaaacaactgtaatatgaaaagtcctaaaataaaaggtcaagactaaaaatatcttataaaaatctaaaattacaaaacaaggaaaatttgtttatcaaagtttgggataatagtcttatctctttcatccacactaatataaataggatacatacacaacacattacaagaagataaatccaaacttttctttctctctctttcgtttcccattttttctcttattactcatagatcctgattgatctgaaaaaatggtgaagaagcaatcgccattacacgttgtcggtgtgtctgttttgatggtgttgttatgcagtgttaattacagtctctgtgaaaagatcaaaacgtataagctcacaagaggaagcttaagtgttactttcactaactatggtgctgtcatgacctctcttctcctccctgacagacatggtctgagtctctcttctctcctatctcatcctttttttttactgatttttctgtgtttcaaatctgaatttgcttttcttatgattcaggaaaacaagacgatgttgttcttggatttgatactgttgatggttacaaggtaattttcattttcttactttttcttctaataggtaaagatttttgcttatcacattcttttggtcaaaatcttggggtttggataaaactcgatgtccggctcaaaaaagactttccttttaagatggtcacgttgttcgatatatccacttactattaaaaaagattttttactttgtataaccacccacgtgatatttggcgttattgttagagacaattagttaagttaatgataatattttttttgtgtgtgtgtagaatgatacaacatattttggagcaattgtgggaagagtggctaatagaataggaggtgctaaattcaagttaaatggtcatctctacaaaaccgatcccaacgaaggccgtaacactctccatggtactcaaaaccgatcgcatgagataaatcttcaattgaatttcatttctataaattgtgttattgatgatggtttttgttgtttaataataatcaggtggttcaaagggatttagtgatgtgatttggtcagtccaaaagtatgttcccactagtcacattactttcacatacgatagcttcgacggtgaagaaggtaaatctagatcgtttttaccattttgtgaatttcattattatttatctcataatatttctctttttattttacaaaataaaaggatgcaataacctttttttttacaaccataatgtattttgaaaataataaatatatatttatatataatatatataatttattttatattggttttgaatggttactgcagtttaagcagacaaaaccgtctacaaatcggatcactttttatttatcattcacaaattatagtccgtaacggtacacactcaaaaaaccaaaaaaaaaaccgctgcaaactaactgtggaccgttttcaaactaaatccacaacgatttataattcgccctaaaaataatatggattgccgacggattaagtcagtactaactacatcatctatttaaagcaaaaattttagtatgattaaaaaaataatgaagatgatttctattatgtgaaaaaaataaaataataatttattatttttgacaggttttccgggcaatgtgacggtgaaagtgacgtacatgttgatcggagaaaacaaactcggtgtaaaaatggaagcaaagccactcaacaaacctacaccaatcaacttagctctccacacttactggaacctccacagccacaactccgggaacatcctctcccacaaaattcaactcctcgccggaaaaatcactcccgtcgacgacaaactcattcccaccggagaaatcacctccattaccggaactccttacgatttcctcgagccacgtgagatcggtagccggatccacgaattacccggcggttacgacatcaattacgtgatcgacggaccgatcgggaaacatctgaggaaaactgcggttgtgacggagcaagtcaccgggaggaagatggagctgtggacgaatcagcctggtgttcagttttacacgagtaatatgatgaaacgtgtcgtcggtaaaggtaaagccgtttatgagaaatacggtggcttgtgtttggagactcaaggcttcccagattccgtcaatcacaagaactttccgtcgcagattgttaatcccggcgagagttatttgcatgttatgctcttcagattcactgctcactaatcgggtcgggtcgggtcgggtggggtcgggttattagggcttaatatttccgaataaactcgccaacatcgttgtaatgcaaaattgcaaatgccaataaaaatattcgacttttgcaggaagttgttaaaagttgtttattctcaatggttcgttttgcaaattgttaaaaatattatttttcacaagaaagttctaaatgtttaggagtgatttcagacgaaaacataaaacggtttaagtttttttttaaggaactacggaccagagctggtagtagggggcttcttgaactcgatcttgtcgactttaacttctccatcgattagctcatagacatagactacagctcggaaaccatcgatgtccataaggacaaagcttgggttaacgtcttggtttatgctgctgtaagctccggttgcagagcccgggtttatcaccactcctccctcgtgtttgtacgctgtgaactggtgggtatggcctgttacgagaatgtcgacgcccagttgtctctgaagcatggcgagtgagtctagatcaccccatgggatcacctgtaccacaaatagagaagctcgttttcataccactgcaaataagttatataacttaactaaccattgctcttattctctttcatagttttagtctaaaacattgacattgaaaatgaaaatcattgacgccgaaacttttatcctagacctttcccgtttactaatctccaatacagttcttatcatatatagaaaaagtatgtgcagattagaggcatctagacaaaaactattttatcactgtttaccatatgacaaagtaaaagggtagaaagataatattccatctgatatatattcaaagcctgtttaaattatcatgcaaaataacaagcgagccaacgctgaaactcactgggtaagggacacacaccaacaaagcaatgaagtaaaggcaagcaaaatttggttttctagtctgagaattctgataaacagatgatgtatgatacgagggattattcgtatgctgcaaatgctagcgtctaactcgtaaagatcatgatgaaatgcacaaagaagggaaactgaacctggtggccatgacacaatcccagcttgaattgcccaatagtcaaggttttattctcagggtatcgcgcatcttcgtcaaactcccctcgaactatatgcaaatcagggcagatagtcttcaagtagtcatggatttcctacaacagtcaaaaatatgttaagcttaccacaaacatgaaccatataagactttgcagcatacaaataaatcaggtctgcagtttctctaagatgggttttcaactaaacaccttacaaacttcttaacatatcttccaactaaaagaacatcattggcttctcataaatgactcatcgatgctgacttaatcactttacaattccatggtcacaagcaaatctaaaactaaaactgatcaaaccaaaatgtaatggaattcctcttcccattttacacgactctcacactacaaggtaagaattcaaatctacacaatccagcagatatagaacaagctccgagtagatcacataattcactattgagtctccttatcaaatttctggtaaggcttacacaaccaagtaagaaaatagttctaaacaacccaatacaggataaacatagactaggttgcatcagagaaaagcatcatataaagcttgaaattagagtctaccctccttctgaatcctcatttctgcttcataagtaaatatcccagaaacagttacatcagacagaatgatcccacaacgacattaacgaaaaaaaataaagcatactagagatgtaaaagttgaaaatttgaaggaaaaaaaacactactttgatgcagagatttccagtgcagatgatgtgttgaatcttcccaggaacaagcattgatttgaacttaggaggtagatcagccgctctatggggtacatggagatcccccaatgccaataccagcaccatttcaaaactttcaccaaataaaaaaccttcaaagacgttggtgaaccaatcaaagatcaaagtttgtcacttgttaaactaaagtataaagaatctggattgagaaacagatcaaaaaccaaaagtcaatgagatctacaatacaatgtggaatcatttccaaaacccttccaataaaatcataacaccaacgtaatcagatatcgcatagtttcagttaactacaactgttaagtctttctttcactaaaatcgaacctaaatcatacttcgcgaaaatcaaacataaaagcatggttttgacacaaagtagacaaaacccagatgtaattcaacactagctgcgtcgaagagattaaagggcttattgaatgattctaactacagagaagaaattgccagaaacttgatacaaaggtggatgatttccccaaaagttaaaaagcgaaactttagaagatcagacagagcttaccagatcaagggctcaaatagactatcgaataagattcctgatttcaaggaatttgatgtttttgttcttgcggatcttctcagcgatcgcccatggaagatcctttgttttcccttttcttctctctcgatgatcttaggaaaggcaaaacaatatttaaaaagactgagattttagaattaaaaattattttttcatatatttcaacattgcgtgaatttgctgtataaccaaaatctaatataaaattaataatataacactatattcaaaaatattaagaaactaacatattgaagtagtgaaaagacaaaatggtacaacattgagagacacgcgctaaagaggatgtgatgagatgtgtggaagaagagacaataatccaatgttaaaaaaataatattactccaaatgattttaattgttgaattagtgctataaaaataactaattaaattttaaaatagttttataaaaacataaattttttataatttaatacaaattatttaaaatagtgaataatgttttgtataaaacagacaaataaaatagtatagaatgaaactaaatagtatagaacaaaacgtagatccaaatgactgaattaaaccgctttgatcaaaaaatactataccctaagatacaacattggcaacccaaataaccaagattaattgtagcggtgacgttgacgatggtaacattctgacagttttttttacccattcgttaatcaatagtttaaacagacaaacaaatcgaaatcgaatgaattggtttgtttgtaggataagttaatagaattacagaaacattttctgggcaaatcaaagaagttggaatctttaatagacgtcatcggtgatgcaaacggatagagagagagagagagagagagagagagagagagagagagaagagagaagaaagagagttacaattagactggagaaaaaatatcgaaaaagagagaggaaagaggaaaagaaaagagagaaatgggcaaaattggaaatagtatacaaaatacaaaatatatcagccatctcttttgttgatgtcattttcttaattataatatttttgtgcgttagttttgccaattgcccttcaacattttgatatttaatacgcaaaatttaagttgttttaatattatattattttattcactaagacaatgttaatttaatattgcattaatcttaagtaatactataaataaaaataatattaatatacaagttaaattcatgcataatggagcttgaatatatagataaatttttttgatgatatataaaagaaagaattaaaactaatgatatctaaactatctaattaatattttaaattaaaaaaaattttgatttatcacaaacaatgttagccactaaaaaaatgtgtatgagagagagtgtgtttctaatgtagaaccatagaattctcaaataaaaactagttctaaaagatttgtcttgaaaaatagttttatttatttaatttaattacttttaatgggaatatcttaacttggaattttgaatggatatgttctaatagctttatttcatgaattttactcttttacttctatagcgcacaagcccggcccgaagcagaagcccaaaaagcaaaggtttccgacagcagattttataaaaaaaattaggggcatcaaatttgagaaggtcctttagtgtagtggtttagtggtgtgtcctccttataatgtttattttggcatttaaacaaaaacgaaaactcaaaataaaaattaaataattatttactaaacaatttaatttcaaaacattaattctctctattctacaacgatttgtttttcttctttgttcatcactatcaaaactctataaaaaatatattttagtttcttctccacattaatctcttacactagttgttttctatcttctagtcgaagtgttggaacttttgaaaagaatggatggttgttatccaaacacattgatcgtttatcgtatactactcaccattctggtttcagttgcttccacgaagataaattttttaaaattaaaactcataaaaaattatttacgttcgactatatctcaagagcgattgaatggtttggcgctgatatctatagaacatgaactggttgataagctcgattataaaaaatttgcaggagcaaaagtaagaatgattatgtttcgcaataaagaaaaatgaaaattctgttttttttgcttgtaatgagatttctctatagaaatcggatctattcgaggaaattgtctctaagcataaagtatttgaactttattttggtataatctaggataacatgcatgtatttttgaacgtctaaagaatctcagacacacaaaccaacttttatgatgcgaatgcaaatctgctgaattgctacaaacttgtttttaattctgcacgtcattttagaaacattatgtactgtgtacagcacttgcctttgattttcttctatccaggacttgccatatttggcctataaggctttattgtaatattatttctctttttattataaatatcaaagagaaaaacgatatgttgtcgccatgttctttctattgtttgctcacactaaaccgtttattatatttttacataccaaacaaaactatcaagaaagcttcaacttttaattatattttttcacagttggcaaaatgaaaaatcaatattgcccactagatcgtcacactaatatgtgtttagagttttaggagttttgctgtccaaagtttttaattaattaaacaagataatggcataaaatatgaaaaaacaaacatagttaaatttgtagcatattttctgtgggacgtcaatttagagcaacatgctatattttatttagttataaatataaaaaaatttatttaagaagtacgttttatgtaatttaaaattcgtgttaaattttattatatatagtcacactgtaatatggctagataatggttaaattatacttcctctgttctaagatatttgatgttttgagtttataatttgttccactaaaattgatgttatgtaaagatatcatcattaatttagtttgtgaccaataaaagtaggagagaagtaataataatactattaaactaacaaaataataattaaaaaatacaaaagttattttttcttaatagatgtgcaaaactcaaaacatcaaatttcctagaacagagggaatatgtatcttcatttttggtttttgatcaacatgtatattttttctttttttaataaatcgacatgtatcttcatttctatctatatattattactaaaacaattttttggggtttgaagttctctaacaccatttcggggtttaaggtttatgttcacaatccgtataacgcctttaaatgcttgacgaacatgcatgatgcatctagatcgaatatcttttgttaaacactggctcgacctaatcccattctttaaagaatgtgtgttgctgccgtgttgacagctagtttgatcggtgtaggctcttgaacagtattcaacaaatcgatgtgcctcacttattgctcaaagtgttctgaaagaaaatcgtattcaatcgtatattggacaaggaggtccaagatatggtttgatgtcctaatcgagcttgatgctcaatatcatttatttgctttatgattgctttttcgtattggtttatgattgaattatttctccgaccacaacaaaaacattttttttttcattaaaactcaatagtcaaacaatcgtaccatgaaaatatcttaaattcaataccttttctcatgtctaacagggttgtaacacgccttgaaatgtcatcagctgatgatgctgctgtacatgaatcaatttaatttgtttattttcgtcaatgaggattacttatattaaactatgactttactaaagacaaattgcacataatctatagaaatatatattccctcatcctctggtaatcctttcttggtctactataagatttattcaatactcaaactttaatgtcgaaactaaaactgtcatagagaacaaatatatagccacacaataataattatccgattttcaaatttctttggaaattttctcgttgaatctaccgtaaatcaaatatgaattagttattagttcaaggaataagattatgaaatttcaccacacacacaaaaagccctttttcaataacgagttatgattatatccataaatattaaaacaatgaaagtataataatctttaaaataagcttaaaaattgttttgataaatgatcttatattgttgttttaccctcatcattttgtacatgcatgatgatacaaaactaccaaacacttctttagttttgttttgtcaaacactattctttctttctatgcaattatatctctgttgtcttcattctatttctctctgtacttcttttttatttttcttcttaaaatcatattcgtacataaattttaaatattgctatcagttgatgaaatttctttttagaaaatcattaatatcttttcatctcgtagatataaaatattcgaatatcctatgatcatttctatttgacaacatatccaatgattatcataataattattaaatttactaactatgttaaagagtaagtagttaaataaatagtttggtagttagtatcagttatcaaaccagagagaatcttttagactcgatcaaacaaagaccttccattacaaaacctcaaaagttgaagtcaataaaaatctcttacaaccacaacaacttctcagattcttcttcgctttgttgttcgttctcttcttcaagctctctgtctctccaaatgggcgacaccggtagacacaaatggttctccttccaccaccaccgttcagcctccgccacaactatgccacaacacaacagccccggcgaaactccaacagagttcctctgtcccatcaccggctttttgatgtcagaccccgtcgtcgtcgcttctggtcaaacatttgaacgtatctccgtccaagtttgccggaatctcagttttgctccaaagcttcacgacggaactcaaccagatttatccaccgtaatcccaaatctcgccatgaaatcaacaattttaagctggtgcgatcggaacaaaatggaacatcctcgtcctcctgattacgcttacgtcgaaggtgttgttcgtacccgaatggattcacttcctccgggttcgggtcatcggatcgctaaatccgaaatcttaccaccggtggctgagaattcaaattcaaattcagattacgattccgtgatgggagcgattcgatctcgttcaaggacttcattatcgtcaactacttctcttccacttcaccaaacccgacccattaatcactcgacccggatccaaagctcattctctacatcggattattcatcttttcctccgatgtcaccggaagaagaagagatctacaacaaattgacaagtgttgacacaatcgatcacgagcaaggtctgattcagctaaggaagacgacgagatcaaacgagaccacgagaatctctctttgtactgatcggattctctcattactccgatctctgatcgtttcacggtacaacatcgtgcaaacaaacgccgccgcgtcgattgttaatctctcgttagagaaacctaacaaattgaaaatcgtacggtcaggattcgttcctttgttgattgatgttttgaaatcgggatcaacggaggcgcaagagcatgtaatcggagctttgtttagtttagcggttgaagaagagaacaagatggtgatcggagttcttggtgcggtggagccgcttcttcacgcgcttcgttcatcggagagtgagagagctcgtcaagacgcggcgcttgcgctttatcatttgtcgttgattccgaataaccgaagtaggctggttaaagccggtgcagtgccgatgatgctgtctatgatcagatccggtgaatcggcgagcaggattcttttattactgtgtaatctggcggcttgttcggaaggaaaaggtgcgatgcttgacgggaatgcggtgtcgatactggttgggaaattgcgagaaagtggaggagctgagtcagacgcggcggcgcgtgagaattgcgtcggggctttgttgacgttgagtgtagggaatatgaggtttagaggattggcgagtgaggcgggtgcggaggagattttgacggaaattgtggagagcgagagcggaagcgggcggttgaaggagaaagcttcaaagattctacagacattgagaggcggagggagtgaattcggtgaaggagcggaggcgcgtgagtggaaccgtatgttggaagcgagtgggctaagtcgttctcagtttcaacaaggagggcaaaaagggggttttgcttattcctctcagttttagctctattcaatttttttattttcattttcttatctcttttcttgttggtaaatttttttctcaaatatttgtttttttttcactcttttttgtgactaatattttgggagtgaatttgtaatatctgattttaatcttctttaatttgtcatttctaatgaaacgacaaacagtaaaatgttgattatttcgtttgtaaagagttgctcttgtttaatttgtgaaaacgttagacaaacaaaagtcgtctcgtggagagttactctgtttggtgtaccgtcttcagatcttttgattaaagtacgtaatataagatttggaacgaagatttagtcgttggtcaaataattctaaggtcaacgtttcaaagtgtaccaagttggaatattctacaattattttgcctgaagtcatgtaatccaatcgccaatttgccattcgtcatgcaaacacgtcatgggtacatagccacacatactctatggaccctatttatatgttacgagaatagctggacgtgttgaatcttctttctgctagagaattaaccacgagcgaattacactagtgttagacagtgtctggtacaaccgtacaagtgacaacattccactattaattagaaattaaactcttgttgcatggtaagaaacaatttgtttttaggttaacttttcaggagttatggactgagaggcccatacatctctccatggatatgaaacaatttttgatcttttgcttgatgccttaacatgccagaaataaaaatgctaggtgacattttctttcttttttatttttattatgctagatgacattatcattgaggcataaccgttgtattggtttagtattgccgttgttgcttctcctgaactcagggactttaattttattgaaccggcccctggattgaataaaaaaataaaattttgcacccaaaacccaaaacaaaaaaaaaaggaaccggatctaatttataccgagaatttagtcaaccggcccagatttcactaaattttgtgggtaagaaataaatcacttcaaaacaagaagagtaaaccgatctgaatattgcaccggtcagtcgttttcctacgagatgagtaaagcccaaaaacggaaacgcctaaacaaatacgacggcgaatcaaaaactccggccaataaatcaaccgtcgacggcggcaatccttaccctacactacttagacctaccgctgaagaatgccgagacgtaagggatgctttgttgtctctccatggattccctcccgaattcgctaattaccgccgtcaaagactccgatcattctccgccgtcgatgatcacgatacacagtgtaatctgaaatctgagacattgaatgaaacggaagaggagagtgtacttgatgggcttgttaagattcttctctcgcagaatacaactgagagcaattcccaaagggcttttgcttctcttaaagctacatttccgaaatgggatgacgtaagtgctatgtattgtgaaggtttaagtattgtgatgttaattatagttatgagtttaggttaagatttagttatggatcaatcatcaatgcatagaaatagttcaattaaagcatgttcttggacaaaattgggaaactctgagcttaaaactctttaagattttggttaaacgttttgagaaaatgtatattgccaatgtaggttttgaatgctgagtctaaatcaattgagaatgctataagatgtggaggattggcaccgaaaaaggcggtgtgtatcaagaacatattgaaccgtttgcagaacgaaagaggtagattgtgcttggagtatctgcgaggtttatcggtcgaagaagtaaaaaccgagctctctcattttaaaggagtaggacctaaaacggtaatagcctcgctcactcgatagaaactatcttaagcttcttattcatagtcctttagacacctaactcttggtaacgatgtaacgatcattggcaggtttcttgtgttctgatgttcaatctccagcacaatgatttcccagtagacactcatgtgagtgtttcttgtttattcttggcttttggtgtttgtttttcattgagtcaagcagatcactaatgagatacaaaccccgactgaaacaggtgtttgagatcgcaaaggcgttaggttgggttccgaaaaccgcagacaggaacaaaacgtatgttcatctcaaccgcaagatccctgatgagctcaagtttgatctgaactgtctgttatatacacatggtaagatctgcagcaattgcaagaagaatgttgctaaaccaaaagctaaagtggcatctcctgatgattgccctcttgttggtttttatgatttaatagtttagattatcagaattagaactcttttgttgacttgttgctcttaatctgataaattataaaacagattattaaaatgacacaatcgcgtctgttctatacgacatactcgagctcattagttttgcatccaataccagattcataacatcacaacagaagaggtctacaaatgtatactatataacttcggggtcaaaatgaaattattcttaaggtatgggtcaaaaacagaaaacgaaaattacaatttaataagttcattattgagaaatttgcagaaaaagaccttttcgatttcgtctccattgatgatattcgatagttagtggctaatttgctatcatctcactgcttcaattttggctcctcatcggaaatggcgtttttactcaacacctcgatttcatctcacctccgatcttcttcccaggttttgttcttggatcgaatcgaatctcttttaacggatatagttcgattcttatatttatgacaaaatcgtttgatctttatgcagaagacggatggtgctttagctcaatcccgtcgcgggttccatgtggagctaggtgctcgtgagaaagctgtaagtatctcttacatttatatctgttatagggtagggatcagggatcgattcggtcagattagattgtttagaaaaggagaaaatttgttttggaaggatctttgtatgtcaaatagtaattgtaggtagtgtaattgttctgaaagagcaataccgaatcgaaattagctgaggcaaagagggatatggctcctagaagatttgattttttgatagtttctctgagattcatgtttttcaatggttgtctttgttgcagctcttggctgaggatgcatctttgaggagattcaagtcgcataagaaaggtgttcatagattgaaaagaattggagatgtgctcacagttgtcgttgtcgctggtatgtgaagttattttctttacatgatcagtttcttttttgttgtgattcatcttgtaccatataggatgaatctgaacttggtagtcactgataaaagtgtttagagattcactttaggatgttttttgttgcgattcatcttataacagatttttctgttatcgatcaagaaaagctgcagatgaaaatgtatccttagttttctgaagatgttcttgtgctttaccatattatctgatcatgttttcatataaacagtggaagtaaattggatagtagataatgtagtagctgggatggtttagatggtggtatctcgccaatggtatctccattgaattaatgttattgcatcctctgtttagatataatcagcacttagtagaatagtgtgtgtagctcatatagttaggtgttgatgacatagttttgtgtgtcttgagttggattgccttctgatgtgtgcttgtttcaggatgctgctatgagatctatgcgagagtgatgagaaaggaagctcaggctgcatgaggaagctcatgagtttctttatctccctttttagcaatctcagatattcatcttgttactcatgtttggcttttgaataagtgaagaaacgaaaaggattttgtaattgtcctatggcgaaaccttgtatttgtcttccagaaatccaaatcgctttacatggaatcacgagctcattgattattgaaatccaaattcactaaagcattctctgtgctcttctcttgtaatgtattgtagagtttaactttatcgttgcttctgatacttcatagtattcgatatcgaaaatgataagttttcttttgctatccattttgcgttcatacaattcttattcctccgggttcatgttctattgtcatcaagccagtttccggattcacagattctatattaccttaacaatttgtcagtagtttagtgtaactattgtaagaaaagtttgttcttttgctattacggaacttttagaatcacattacaaatttagtgaaggtatcaaccaaaaaatttcatttatttaattgctcctagaatcgaaacaaagatatagcagttgtatgaaagaaacaacacacacaaagattcaaggaagcatctgctgcttgagggatagatagcaactgaattcggatcattcgggttgttcttcagattcctcaatctccagcttctgcaaggaaaagaaacataaaatggatttagctttggataagacattaacaggggtaagatttgtagtccagaagggcataacacaatgtaagatttgtaagtaaaactatacaccaagagtaaaagaaaggtcaagggatacaaaaacaaattaaagcaaaccatggattattaccacatggcatctaccagttgagttctcttaaaatttgacaggaacattaaatttctcataaacagttgtaaaatcttgagaaaaccataaacaaccattgcattttcattttgatactgtaaattcactttctccatgaaactaaaaaaggtgaatgaatattagccaaggaaacaattttagcaacctaatgcaaacaatagctctgaatccaagacacaggggagaagaggatgttgattggctggagtaatgttcagaggcttcactcttaggtataggtctactgtgtaccgagcctaagattgaagatatcatggtcggtgagtgagaactaaacttataagcagattggttagtgtgtggattttcccgggttatggttgagagtctctctcactaatgaagtctcaatgggttgttttaaatatgttcttatcaagttcctcacaacttcgcacataaaaggccttctctatcagtttaagatatattatggacttagaacacatatttaatatccaaactgggacaagatcttgctgctagaaagataaagacattactaacacagctgatccattgcgtagactaagtatctaaaccagtaatctctaacgatgccagagatatcaccatttccagagaaccaaagcatgtagtatatgattaaaattttccaaatcctaacagttactgcacaaaaatttgtttatcagataagaactagcaacaatatagaaactttcataaaccctaaatttggccctcaggtcaacagcaatcccaatgaaatcaaagaaactttctacaagtgatcattttcatacagccgaagaacctcaatcatctaacaagaaacgaaaataataatgtagaggaaacgtggatcccccaaattgacaagtgaagggagagaagaaacatacagattgagcgttgtgccaagagagaccacgatagacattaaaggagaaagtagcggtgaggtagatggtggcgagccctagccccgccgtgaaagccttgaacgaccaatctccggctctagtcactatccccatttctcttctcctcctttttcaacaaacaaacaccacaccggatatttattatggttcgatgcaaatgtgtaccgactggtttggttaacattcggtttattatgtttctagttaattcggtacaattggtaaaggtaacgattggtttcgaatttgaacaaaaacatgatttcgagtgtgagaaattgcggcacaatccaacggttttgtacaacttcgatttcattgctccagaaaccggttgaggagaacattgtccgtatctcgaatcaggtgatggtcaaatttgatcccaactctcaccttaggagtctcatcaatgcagggaatttgcgagctgctcgccaagtgttcgataaaatgccccacggagatattgtttcatggacatccatcattaaaagatacgtaactgcaaacaactctgacgaagcactgattttgttctccgcaatgcgtgttgttgatcatgccgtctcacctgatacctctgtgctaagtgttgtactcaaggcttgtggtcaaagctccaatattgcatatggagaatctttgcatgcttatgcggtgaaaacttcgcttctcagctctgtatatgtgggaagttctttactggatatgtataagagagttggaaagattgataagagttgcagagtctttagcgaaatgccttttagaaatgctgtaacatggacagcgattattacggggttggttcacgctggtcgttacaaggaaggtcttacgtacttttctgaaatgtcgagatcggaagaactatctgatacttatacatttgctattgccttgaaggcttgtgctggtttacgtcaagttaaatatggtaaggcgattcatactcatgtgatagtgagaggctttgttaccactctttgcgtggctaactcactcgcgacaatgtacactgaatgtggggaaatgcaggacggactttgtttgtttgaaaatatgagtgagagggatgtggtttcgtggacaagccttattgtggcttacaagcgaatcggtcaagaagtaaaagctgtggagacatttataaagatgagaaattctcaagtccctcctaatgaacaaacttttgcatcaatgttttctgcgtgtgcgagtctttctagacttgtgtggggcgagcagctccactgtaatgttttgtctctaggtttaaatgattctttgtcagtgagtaactcgatgatgaagatgtattctacatgtgggaatttagtctctgcttctgttttgtttcaaggaatgagatgcagggacattatttcgtggagtaccattattggagggtactgtcaagccggttttggagaagaaggttttaagtatttctcatggatgagacaatcagggacaaaaccaacagattttgctcttgctagtttgctgagtgtttcaggaaacatggcagttattgagggaggcaggcaagttcacgcgcttgctctttgttttggtttagaacagaactccacggttcgtagtagtctgattaatatgtactcgaaatgtggaagtatcaaagaagcttcaatgatattcggagaaacagatagagatgatattgtttctctgacagctatgatcaatggatatgcagaacatggaaagagcaaagaagctattgatctgtttgagaagagtctaaaggttggtttcagacccgactctgtaactttcatcagcgttctcaccgcctgcactcattcgggacagcttgaccttggttttcactatttcaacatgatgcaagagacgtataatatgagaccagccaaggaacattatggttgtatggttgatctgttatgtagagcaggacggctaagtgatgcagagaagatgatcaatgagatgtcatggaagaaagacgatgtagtctggaccacacttctcattgcgtgtaaggccaaaggagacattgaacgtgggagaagggctgctgagaggattctagagctggatcctacttgtgcaactgcacttgtaacactagccaatatatattcaagcacagggaacttggaagaagctgcaaatgtaagaaagaatatgaaagcaaaaggcgtgatcaaagagcccggatggtcatcaattaagatcaaggattgcgtttcagcgtttgtatctggtgatcggttccatccgcaaagtgaagatatatacaatatcttggaattagcagtatctggtgcagaagctcatagatttgattgcacattaaagagagcttttggggttaatttatattcctgaagaaacaattaaatattctcatagttcagctttttgtttaatctgctcagctgattcagtcaataacaatcaatgtagatatgaacctttgagaaaataagaagaaatggattagtttgcattttgcagtaatactaataagatatggatgagtctgatttatacatcaatcaatatgaacacgttacagctacgaaaaacaaaaagatataggagaagctggctaattccatggactctgaagccgtgattctctgaaaacagaagtgccaccaaaacccgctggtgaaggagatgaagcaatgtagtttgttccagacgcagaaacagtgactgcaggaccgggttgagaaggaccaacgagcgggctccatcgagaagtatgtggaacctgataaacagcaacaacaatcaatcatcatatatacatatatgaatgcaaaatcagagattgaccaaagagattctaagtagtttggttatattgttgtttaaaatgaagatattgaatatttaccatattgtgttgtgacaaggctgctgctcttctcagaggagattcagatgatgaagaagcgccacacagtcgaagcagagtacgagtttgagcattattatgattcgctgcatcatcagtttccccgccttccatgtgagtaccaacattacctcctgagtcattcgagacatccacatggagtggaagagaaggacgagtggctacggtggttccttgttgttgcatgtagctgcgtcttttcaattcttcctcagcatttaaaatctgcgtatcagttaatttgacgagtatgattacctcaataaatgggaatcggtatacaggtgaaacacctttatagagagaagggcagacactgaactgacctgcttaagcacttggactagattgtgtttctttgcattcaaaacttgtaatctctcctccacttctttccgttttaactctgtctcgcttggtactttttcagctgcttcattcgtctgtttcgagaaaagagaatacagtcacgaaacgaaaaacaacaaagctatagagaaacaaaacaacttcacagaaaataactacgagatttaagccttcaaggttccctaattggtaactctattgcagcctgcctgattgtttcatcaatagacttgttgcatcacaaattcacaacatctatcaacgtgacttaaactacttgagcacacacatcaatgaatcaaactgcttgtgaccatggcggcttcgcttatacaacgtttattctacaattcaacagatcagccacttaacttcagtaaattcacctaaaatgacataatctttcccaatcttcctatgtacttcacaaaactcaatgagcatggcgattctagacttaactcagctaagtagtactcaaattctatcgggaaggtcacatagagattaatatcaaagaaattcaaacatacctcctcctccttggccgcatacttgtgtggcacattatcggtttcctttgattccgtcactctcccgggacgatctccaccgtctgatcgagctccttcaaaacctctgtcgttgttctcatctcccttaacccgattcccacaaatctcctctctctttacctcaaatagcttctgcttcccagaagaaccgttcgcttcagatggaagaattggattctcctgatcagtaaccaactcagtcttgacgctaaggttcaaattagggttaagggggagacgagaaagggcttttttacggcgatgaagaagagatttgaaatccttgaaagagagattacggtcaggcattatccaccggcgaggtacgtcgggaactttgtgaaggttgcctctgtacatagatatcgccaccatcttcttctgcttttgggtttcttccgttcgtcgaattcgccgttgccttctgcttccgtgatcatacggcgatgggatttcgacttgcatgacgttttgctctgagaggttagaaacgtgtgtcgtttgttttaagtatctaccgacgaatttgggcctttcacccttgcaaacccaataatatatgtttaaaaagcccatttaatattcaagaattttgatacaccttttgggtttggtagtgctaggtatcagtgcttcacggggtagttctcaacgttgatattctccgttttgatttattctccagattattttagtgcgatctaacgaagaagcagaagaagatctcacttagatatccaaactccgaaagtgagtatcttgcttggtttacttatatggtattgtgagtactaaatattagacggtgggcttccaacctacctggtaataggtggagaggcttatatcttatatataccacttaagatccgatccaagtattgggtccggccgatgtggattgggttgagtatgtgcggatcgggctctggtaccatattagattgtggacttccaacctaaaaccaattgacaatatgtggagagacccatatcttatatataccacttaagatccgatgtgggataaaatcgctaatactaaagagatatctttgtgtttgttgttgatggtttttgtcttttggcgcatcaagattagtacttttggtttctctgtggagtgtatgcaacttctctaatcaatggtgttatgatcagaagagtgttttgattctggaagatatgtatatatggacagtgattatagtctacataagaatttgagcaaagaagcttgctctatttgaaatagagcggtacaagtttcttcaaggtttcaaacacacttgtgaagggatcaaactggactgactttcttaatccaagatctggaaactggttggtcagtgtttgctccatacctggcatggacatcatggctgctagctcagcatcagtcacttcacagtcctgtggtgtatcctttattttttccgggtcatagccaaattgtgccaagtagttcttgtactttgcgatgaactcaggtcctggatttggcgtccttgagtatacctaacatatcaaacacattaggtttatataagagatcagtgcaagagatatttctcaaactcatgagttctttctcttagaatcacctgaacaaagcccttgtctttggctccagaaacaagtgcgtagttgtcgtagtctgtggctatgacatcataaggcaacttggggataaaaggaatggtgggaaatcgtaggaaacacttctctttaatcatctcttgcttttctaagtcagtctcgcttttctcgaggtcttccgctcccacgcattgaactttccctctgattcctgttatatatccatcagggctgccatgaacacaaaatgtatctactctaatggctgattccttcatatcaaacgtgtatactccctgcaacagttgaaaggttctcacactatgttagcagaggatgtgttttcacaatttgtggacttgaagaaacaattacctgagtgcaatgacagtcttcttggccttgacctgcaaatccacgcttaagagaagctacttcaaaccatcttccagagtacctaacagggtcaaagttcttagcagtcatgcctctcatcatcatcatcatcattgattccgagtcaccatcagatggaagagtcagcttgttttctcccacagcagcagcactccctagttggcaaatgttctgataaccagatgagagatccaacgctataccctgccagaagaaactcagaaatttcagaccgcttgtggttgcaatcgaacatgcttatagcaatgtcggctccaacatacctggcctgcctgagagagaagcaaaatagctgcaaaccctgaaacaaaacacttcctcaaagcctggatttcaaagagattctccaaggaacattttaactcaggattcttcaacaaccttctggaagaacagcagcacttgactgtgacagaggaatgagatctcctgtcataagtgaaaccaagagaaaacagaatttctgagatcagtaaaccaagaatctctataatccaagatagttccattccaggatctgattctgtaactttgttcctaaacctataactaaattaatgatcttgaggttaatcggagctaatgaagttgtgattcaaaacataaaaccataccttgttgaagtggcagcaggtggagagaagctttgagaagaaactggtcttgagaggcttatactactacttaataatatcatatctctctctttctctctcacttcttttggtcgccacagacttttatgtctttttttaagtgttgacaggttgggagatatttctttctctttaccttgtcacagaaaaacactgtcgttttgaaaaattctagtgtatagtattaggatagtattaggggatattaacgatgtgattagtgcatggcttcacctttcacgttaactagacgtgttattcgaataaaacatttgacacctatctcaaaacaaataaaatatattgaatagtttcagtgttttttttttctatgaattttgagtgaatttcataaattttgttctgacattttattttaatatcaagaattatcatctaaaagatttaagtttttgacttttgattttttaacaaaataatttaaatgcaaaattcaaagaaatagtgtaaatgttttcattaacagataatttgaagtcgacgctttattctggacaatgaagtgtatgattggtgccgacaaccaagaagtaggtttttcacagactgttcagacctaatgaagatggtgtctttcccaaccaaatggccagcattttcagcgtatttggaggagtttcagagcgataaggaagagttcacttctttttctttatctttaatttctcgtaatgtaaatgtcaaagcggataatttggcacaaaaaattctaaataatgtaaacaacttccctctacattatctcgtttgagtcctaaacaatatctattgataaaaaaaaaaataacagataatttgaagatattttcaaaatcattagttaaaatattctgatatactatcgaacatgttttttttttctaacgcacgtatggatatatcaattattcttgaaccattacactcgagaatattctgccatgattactagagttcttgtacaaccaactgaatgtgacacaattttaagctgaaggctgaagccattcgtagggctgctctaaccatctctttggaatcagattcgaggaatacaatcacatgcttgtagcctatatttccaaaacttagtgtagtcctatgaacatggcttcagcttctagggagcatgatactttaggtattagttcgggatccaacatctaacctactaacacacacagtttcttgattatttcctcaaggttcaacacaagatcaacattacatttttgagtttcataaataagtggaagtctagtataattacctgagtaatgtgagtatcctcgggagctaatgcatcattaacatttgtcttgtgtctctcttcttcactcagccatgttagattttagcagagaagcgtcccttgaataacaagttaaaaacccaagaaaaataaagcaaatagagttacgttgcactaatattcaagttcattagagactccaaaaagatatattattaaaattagagaaactctgaattcataacctttaagtctctgactaaaagataataataaaatgtcaacaaaagtataacaaaatttcgagagcataattagggatcacgaattgagaaatcaattcaattattcacactggttagactgaaacaagtagctgcacttctcaattcattctctccaatttcatcaatctgttccttcaacgatccaccagagctacaaccaccaatatactccaattcaatcaccatatctacagaagaagaagaaaatacatatttcatagttttacaaaggaaaaaacccctaccttgaggcctacgcttctttagaatccccaaatgattgcctatcgtcaatgatatcaagaaactgatggagttcatcgtattcatgatcagcttcttcttcttccactcgctgatgatttgataccatttgcagatttacgagctgtgattgtattgccattacaccgttactcttcatctcatgacagctctcgttttggttgctgtatcctcctccattgttgttgttatacagaaatcgattctgatcaccccaaacattgttattgttggtcagaatctccttgcccgaatctgtattataagcaggaggactatagccattgttgttaacctcactgcagctataagtgtaagacatttgtggctgttgtgtttcggaaactggtaataatgaactaaagaatggtgtaacgacattgctctgattattgttaacgttaagtcccatacccaagtcaagctgctgcgatgtaacatcttcttgctgcttattatgatcactaccaagctcatgaatcatctgattatgattatggttttggttttgattttgaccgttttgtggttgagagcgatatagttgtaattgagaattgacagctttgagttcttcttcagcaaaccagatcatgtattgaagttgttgcgtgacgccgaggcaaccgtggacaggagaacggtcacggacataagactggaagatgattgatttcattgcttctggtttctgagtttcgtctagtttttcgaggatcttgacgatacttcttacgccgaatagcctgtgaacgttttggaaaagtttcggttgttcggctgggaagtaaggcgcgagggggcagtccgcggcgcagcgtctacgttggtacttgcacgcggcacaagccccactcgtgccgcctttaagagtcatgtaaactataagagcgatcaagagaagatctaaaagcctctcctgtaaccctttgtggatgtgttttgtattgctcattcgatgggaacagaacaagagactctggagaattgagaaatgaaaatgaggattttgaaaatgagagatgtgtgcgttagtgtgtctgtgtgttaatggtttttgggaaatgagagaagggaagaaggagaagtagtctggtatataagccggatatttctctagtaaagaagactaagtaaaatacagattataagattgattaaaaaaaacgttgtttgagtatcttcaggggagattcttgtttttgagtttgtttttgtttactaataatagttgctttgtttttacttgatataacagtaaatatatcttacttgtttattttttgagttttggacttgatcaagtttttttgaattttgtacttgatcatcttgatataaacaattttgggaccaagttatttaggttttaaattggattgagtaacaaaataattattatgttcagtcttatcttaattgaactactaaacatctaaagttatattgaattgattttattgaaaattacaagattattgaaaatcttgtaaaatctccctggataagaagactttacaaaattttggaaaaactaatcatagaaattatacaaaactctctagtaatcatttaaaatctttaatttatctactttcaatatatttttaaagtcattaaaactctttttataatcttgtaaaatctccctgaatataattataaactttgatttgtgatttctccaaaattataacatatcaccaaaatattgtatactattcttccatcttctatagaaggtatctccactaaagtgaaaatcacacgcataaacacaaaaactatggtattcgtaagtaaagttacatgaacagggaaccatccatgaagaacttgaagttttattttcaaatattttgttggatatttacttttcatgtgttagattaaactgctttgttctaaaagttgtttgtgtgttgattttcacatagattaccggagcacatgtggaacttgagccattagaatatatatattgtcatcactgttaataagatttctgcatctgttcgtatcattggcttttgtttatatccaaagtcatgattcacaatctctctctttttgtgatacttttcatgattttaatttgtgaagaaaagagtataaaatcataatccaataacacaatattttaaatcattaacaatcatgaaaactgtttaagttgaataacacaaaatttgtaatgactgtattaaaatatgaatcaaataactccagatttacaaagactttaagttactttttacaaatcaaaatctaacaacaccaaactttaacagagtcttataaaattttaattgaataacaaaaaaaatttcatgacatttcaagtcactaaaaatccatataaatcacaaacaataacaacccctaaaaagattttggaaaaactaatcatagaaattatgcaaaactctctagtaatcattgaaaatctttaatttatctactttcaatatatttttaaagtcattaagtgtgtgattggttcatctgtaactgtagatttttgctgtagaatttttgttgtatgtgtgatgactgtagccatagattttattgctgtagaaattaggctgtagattttattaatttaatattattacttgaagaaattggttgtagaaataagatcatggttgtctgtatatttaaacaaaaaaatattattggtaaattgtacttatgtgttatataatagaattcacaaatatcaatttaatatatatatataaacaatgtaagttatatatatgtcataaagtagatatttacctattatttatatccataaaactaaatttaatatatatatatatatatgaaaactatagtaatgttttttaaaaaaatgagaaaaaagtgaaaaaaagagaaagaaggtatagaccttctaaagaccataaaattgtgctttagaaaaacatgaacttacagacaaaataattaaaaaatattatttgggctctgagaaaaaatagaaaagctaaagaatgattgtttaattttggggttgtaacttttttagtggctttaaaaactttttacagcccaaccaatcatggcctaaaattctttcaaaatcacaaaccaataacactccctaaacgtggaaattgaacaacaacaaaaccaagcgtgtaacaaattaattaagaactagtttttaagcttcagacataaacacacattgttgagaagtcgagtcccataagatcatataaatatatttatcaaaattgatatgatcttatacaaaacgaccgaagaaaaaaaggttgtaatgaattttcatttattttctcgaaagttgtatagatatttctttttttgacaatcaaactccatatattaattcacggaaaagaactcgattctatagagagccaatcaggtaccgttgaacttacatgggaaaaacaaaacccgcgaactcttgcacattttgcaagatgatctgcggaagtgttaccactacgagagatatacttaatactaaaacaagcaaataaatctctgtaatagacaaaatccctcaattctgcagaaaaagttggccactcctcaggattagatgtcatctctaaaagatctgaacaatccgttaaaatgaggatacttgtcattggtattgccactaagcacttcattgaccacaaaagagtttccaattcagcatgaaggggtgaaagacttctacgtgagcctttaagtcctaaatgcaacaatcttcctccacatgaaacaagccagccatgtccactcctagcctccgcctcatgccaagacccgtcaataaaacatactggattaaactctggaatttgtgtcatttgcactgttgggtttgtctcggattggggatcttctcgttgatttgctcgtctccactctccttcctcttgaattgctaaatccaaagtttcatgaggtggaacacacaaattatcaaaaatctttcgatttcgcgccttccaaatataccacatgatccatggaaaaatctttaagatctcctcatccgcacccacttccttaccacgccaatacaaataatctaaattattgtaaagtgaaggtgaaggaaacaaagtaggggatgatgggatgttagatagggccaaacttgtctagctggaggacattcaaagatcaagtgattgatcgtctcttcttctgctccacatctaggacatcctttatctctgccaatatggcgataaaatagtcgttggcacgaagccaaacaaccagagacacattgccacacaaaatgttttatttttcgtgtagtttttaatttccaagcttgcgcctttaatgccgtaacactaggtccctgagaagggtggtcgcaaataggacgagaaagagttctcgcgacttcgtatccagatttgacggtgtaattaccagactttgtcatggtccaacaataaccgtcactcgagacattaagactcggtttgatccctagtatgagggtaatttcttccgagagaaacagatcccgaagacggtccatcttccactgtttagtcctaaagtctatcaaagaattgacacacacaagtgggtctctctccactgcaagtcccttaggagggcgagccggtgaatctggtatccaaggatcggtccaaatgtatgtgccaaaaccagacccaatagtcttgcgaattccaagtttaagaacatctttggcggctagcatactcctccaaccataagacggacgattagagacagtgatctctaaaggactacaataccgaaagtatcgtcctttaaggacccgactaaagagagaatctacgaatcttaataatctccataattgcttcgccaataatgcgagattgaactcttccaacgtcctgaatccaagacctccgtctgatagttgagaacaaatttggtcccatgcaatccaatgtattccccgactctctactttattactccaccaaaaattggcaatcgcactgttaagcttataatatattgcttttggtaataagaaacacgacattacataagtcggaagggcttttgcttgtgatttgattaggacttctttaccaccttttgaaagaaacttagaagaccatgtgttcactcgtgtttgtagcctatctctcacaaatgcaaatacttgagcttttgaaccatgaatcttttctggaagtcctaaatatgtccccatccctccttcacgtgatattccgagaattgatttgatatcgtgccttacatgagaaggtacctcattaccaaacataatggatgatttggataaattgatttcttgtcctgaagcccctgcataagagcggataatgtcaataacttctttactttgttctgcatttgcttggcagaagaacaagctatcatcagcaaacaaaaggtgcgaaactcttgggcttgcataagaaattcgaagaccttggacttttccttctctctcggcctttctaatttgagctatgagtgcttccgtacacaaaataaaaagatacggagaaataggatctccttgccgaatgcctcgtgacggtctaatacgtccttttggatccccattaatcagaatacggtatgaaactgaggtgatgcattgcattatccagtttacccatttatgatcaaaacccattttttccatcaaagctcggaggaaactccattctactctatcataagctttactcatgtctgttttgagagccataaactttttccgatttgtcgggttagagcgaagtgcataaaagttctcctgggcgatcaaaatattgtcggtgattagtcttcctgcaacaaatgcagattgtgtctcggagattaattccgaaagaaattttttaagtcttagactcaatatttttgagatgatcttatagcttacattacataagctaataggacggaaacctgacatttcccgcggtctttccacttttgaaattagacaaatattggtctcgttcagcttttcatcaaagataccggagctgaagaagttcttcaccatattaatgagatcaccttttattatttcccaaaaacgttggaaaaataaagcagtcatcccatcctgacccggagcttttgtcgggtttagggagaataaggcgcgtttaacttcctcttcggtgatttcttttactagaaactcattcattgttgaggaaacggacggggagatatctctaagaactatggaaggatctatcgtgtttgcggatgagaaaagattttcaaaataatccacagcaactctctcgatatcttcttcattatcgacccatacaccgttatcgtctaagatgcctaaaatcttgttttttgcccttctctgtttcgttgaggcatgaaaatattttgtatttttatctcctaatgccagccagttttggcgaatcttttggtaccaaaaaatttcttcttttgtataagcttctcccaatcttttcttaagatctcgaagctcttctagagaagcactatcatcagcataattttcctcaatcttatcatggagttctttaataagcatttccgaatttgttcgggttgatttcttccatatggagataactcttttgcagttctagatttttttcataatggggcggtcttccttcaaaccttctccgctccatccttctaacactgcttttttaagtcctggttttccaatccatcttttatcaaacataaattttctcgaaactttttccggacttgattgtatagatgctagaattggtctatgatccgatccccacatctttaagtactccacattggtgtgggaatttctatgaacatataatgcttaatgtgacaatgatttggccaagattactttaactatatgacatcttctaaaacctctccactgaaaccactaatgctttaatcttaaagacaatcttcttccccatcctctttaaactactgagatgagtaaaaatcacatttcttcctctcgagttttcgattatcaaaaaatagtacttactttctttgcagtttgtactttgggagatctgtcgcaacgtaactctacttgctctgtttttacttttgttttctaatttaaagtttcttttcgtagagaagaacctgtggttgcaaatgtcctctcttacacatagaaagaacatcactccagctaccgataacctgaagatattacatcaaatgtgtgataatgtcaacaagtgtatctgcctgcaaagtgcggtgaaaggaaagtcttaccttgacgttttggtcatcgtacatgatccactgatcgtgctcatgactatatgcaaaacagtgataatgctgtccataataacaaacctggagttgcagagataccaaacaaaaaaaaaacattttagggtgaaagcaaacaatgaaaacacaaagtacaggcagtttcaagttcgacaccatttgtcttgtactgtcatagggaagaagaagaagaaatgcgtaccacggaaactaagctatatgtgttcttagggtccacaccacggtacatgatgctgatgtctatctctgtattcaaagctgcaagagtagcggctatgtcttctacagtctcacatgtgttttgccaccctaaaactgcaagtcccaaaatatcagtgatcagaaaaggtttgcagtcatcagaatcctagaaaaggttttacctatagtaaaaacatgtggtggagtggtgagaatatggtggatatggttgcgtttcccacacccaccagcttcgcgatcacaagctagttgatggttcatctcgacaagatttagaagttcgtcaaatgaattttcagcgcatgtaacctattaggcgtaaagagggacaaaaccaaagtgaataatctaataatatatgcgaaaacgcacgtctaatgaacactcatatgataccttcatggtgcgtagggcactagcgttgatgttatggaaaaaggaagtgtacttcaaatgcctggactccagcccacagctgtagcaattcaattgctcagaaacatccattccaaacagagaatgggcaatacatgagcgattggcacagtcccatgagcccgtactgttgctctcagcagattctgtgtcagacacgcttgaactttgagcaaatgagcgatgaaggcagtcgaagattacggccaatacttctgaagcatcgttcatctgagcctgtccaccatatgacgcccaagtttaggctcctttatgaaaacaaaaagctt

SEQ ID NO: 493 - DNA, 107950 bp, Arabidopsis thaliana
aagcttacgtacataccctaaaatggagctctaagaatctcgattggtttgagagcaaaagaaatgaagagagctcacaaatttttaccttttcacttagaagacttatcgcgccactgttgctttctccttcatcgtcctttacattagttatctctgtaacatcatcgccggtgttctcggtaggagtttggcctgtgggtactccaaacatggcctcatcgtgggcggctttcaactgctcttccctttttgccttacaagtttttattaaaccatataaactgtctgaagctctgatataataaaaactgtgacttgattagaggttgacaatgtaagctaatgactcagtaaacctcgatggcggaaaacctataactttgtcccatgcgcttgaccaaggcagcatcatcatcagcacctgcaatcatatgaagtttttagcatcaagagtacagagtaactgagaatgatttccggctttagctctgtccgttcatcgaaatcatggagtaaaggtagagattcacgggaaactgaccttcttctagttcctcatcatcaactggggcctctttgtcgaattcaaatctttcccatcctgcacccttactggtatctttctcagctgcaaaccaagcagatcattaatttcaagagaagaactaaacatgagattgatatcaatgttttcacaaggtatacaacccaagggatctcatttttaaggacagagttgatctttcttgtttttttattctttctcagacaccaggacttttttcttcatctaccataaacacatttacagatttgatatctccatgaaagggtttgtctcaatcctccttatatacagagctgctatgaaaatctatgaggtcaatagattttgctttgctgataaggaaaagttaggaaaagtcttctcccaacagtaacgtgcattgtatcctgaatgccacgagataaagagccaaaacacagccctccacagaactacaccataaagactttgattgatgggagaattctcagctacctgctgacccaatgcccaaccaaaaacctaacattctccgtacctccattttaacattagcacctcaactaactggcttaaggctacgaatcactacaaaactactaaactaataagaaagccttatcagcatcatcaattcaaggccaagacattaagtgccaaaacacagccccaccgttctaacattccaaagatggatcccactcaaaagaagttgtcgaaagaatgagatcttagctgctctgaagcgtggacaacagaatcaatgtaatctctcaaatgggaccgactaacatacccgtttcatcaagctgaagcttcatcttggctttcactttttcagcagctgactgttcaagaaagcaacacaaaaaccaaccttataataccacggaaatgacaatcacacacagacacacacaaaacaccagcaacaaaattacagaatctatgactatcatccataaacaaagaaggagctccacaagaatggtaaaccaaattagagatcaagggtttataatctcaaaacatctattgaatgtgggcacatgaaggcaattcctatgttgcaatatgtaaaggtaattgctaagttcttattacactcctaagtcctaactctagagggattataacattacgatgctgattctggtaaacaaaagttcctcgaagtatgataaccatacaggctgaagaatgatgagagaaatgagtattaccatctcatcgtagcctttgattaaccgcgagtaatcaggcttcttctccttaacatcttctctgctcctccgctctctcctcggcgacaaacttctgcttcggttactcctcctccggctctctctatccccgtacctattacgcctctctgcactcctgctcctgcttctccgtctctctctatccacataactactacgtctctctgaactcctgcttctccttctatggcttttatctctctcatccctctctctactccgataacgacgccgttcactcgactctctatagctcctctccggcaccctaggatcttcaggtttcttcttcaatttatctctgatggaccggatctcggaatccttgttatcagtggatttagtatggttagaagccttgacgaattggttgagaaacgaagacgacgatgcgatcgccgatcctctctccggaacagcgttggctccggtggagaagccgagaccttgcttgaagcgagcagctccttctcctttacgcgtgagctcgtcgtagtaagctgccgctttttcttcctccataacttagctccgtttctctccctttggttctctcgatggttttttctcaaccatttttgttaaccatcttataatccaatgttttcatttgaattttgttagcccataaaatctatattttcgtcagtgtttctctctcttctcgctctctgaatattttagagagagaatacgctcttcttctcgccgtccggtggttatccggctacatgtccggcgtcttccgtttttctcaacggtgatggccggctttcgtctagcaccgactggcttcctaagtagcggtggctagcttttgcccggcatcgaccggctaacctagcggccatggccggattctgtttttgctttaatttttcaattatgtttttaatttgctaataatctcatcggatctacgattagggatgttgatctgccatatccacggtggttcttctttgtctctgtcctttgagttttactccgatccgaattagtttcttatctcttcaagataaatttcggatccttttcttttgtactctggatttacagaatgatttcaaagagatttcactcttttgttgaaggaaagaagattttcttgtgtcgcttatcatggtcccttaagctgttactttaattggagcttcgatgctttcaattcggtgcaaaacataagagtcttcgttcgattccttatcggcgaggatttcttaccggaatcggcgctcaacggtggaggttgttgccggaaaaacttgtgattactcatcaggcgtgggacgtggtttaaccggttgtcgacacgtttccatggatggagtttagattgaaattcttctacagaagtcggttatctatttggtctttgttggctatttctgtaaacctgctgtttgggcttttgttaaagcctatgtatgatattgtgaaagcttaataaattctatcacttgtgagaaaaaaaaaaagaattttgaaatagaacacatctcaatcagaagtatctaaaaatctttgaaatctttttattgaggttatgaaactgtttttaaagtattccattgcacaagttttagtttgaatttttgctcagtgaacacaactatatgaggttatgaaacaaagaaaaaatgagaggtcaatgaattgatgattccggagtgggattatgaaacaagtaaagatcaaaatccgggcaaaaatgagaggtcaatgactcctttgggaagattggcaatgttattaagcagagcgagtctgttcttcctcactctttcttcctcctgcaaaaaccgttatattcaaacttcactcgtctgcgatactcgagtacagtgtatggacaaagttttaacttaccaccattacaaatacattgttgaagaaatcctcgagtggctccaccaattgcatggatatctcggtgaagtcctcgatttcaatgcctgaaatttggaaggttagtgagacgaatttggaagcgagcttgtttgagagaatacagcagggaagaaagtgagttaccagtgtgaattcgatctttgatagaggtgtaagtactccacaacgttctctcttggggagtctcaaatgcattctcatccacctgattgcatcattcaatgttagaagctgcaagttttcacaaatgctctttgatcagacagaaacctcaagtacctcaactccaacaccaacatctttcccacggacaatgcgtgtgggacgagaatatgcttccactatcttcggaaacatctcacctttgcttagcttttccgtctgcaaggcaagcaccagcgatgttagcttctttggagcaatatcactatgacacagcaacattcactaggagaatgatgcccaaaggcttctcaactattacctaattccctagctaactgctattggatcatatcacaagtcactaaccttgtatgcagtccgtgctgccagacaaggattgtttccacgctctgctaggacagacctaactacttcagggcttactccgttgtcaacctgtaaaaaaggataaaacgttgtttcaagaactggacccgtaagatattttaagagctgggaaatcgaaaaagataaacatcacaaaagttgcacgaaccaatagctgttccagtcttcgagtaacaaattgatacacctagaaacaaataaaagagttaattatgtcacgaacaatttcagatggtgataacaagatttgatgccactcaattgattctcacatcttctacagtgtttgcctcaaccttcgtcggttgtacactggctgcaagttctagaacacgtttgaagttgacatttttatccttctcgaccaaaatctgaacctgtggcatacaaagtattacttggcatccataacctcatgcaaccataaaatgacatatcataatagctcattttcagatcagaatatctataaacttactaagccatatgatattcttctaaggccaaaagggtcatttgttgaacttggctggcaaccagcagcaaataaaccaacaaggctatccaatctacagtcatagggacaagcataggtgttagtatataggatcacaaattcgaacaaaaattatcatatcagaagcatatacaatttagctccgcgcaatccagatacaaggttttgtgttcacaggacgaaccgtttggcgtagaaagaaatgggagagacaacaaaactttaggctttcaatttacctatcacctattgccaaaaccattcctgcatctgtttttgggatgacgtctccagaaaatctaggaagtgtaatttccagcaaagcttctgctatctgcatcccaggaacacaattgtcatataataatggagcacatgtaataaatatataccacagtaggctagtagcttaaatctatgaagcaaagaagctgacacaagagcaacttatgctcataaccatacacagacacacttgaacaatccactacctgctctgaatagccatctctgagagcataatgacgagccattattcctgacagcgcagtaaattctgtaactacagcagttgcaagatctgacatagcaagtgaggcagcatcctctacaaccggaagcagatcttcatcaattttgagggccaaacaaagtttagataccatctttttgaggcggttcatcttatccagcatcgtccccagcttttcctattaattcacataaacatggatgagaaacttgtgttgtatgtgctactgaagtcaatattatatggtttgcattttttacttgtaatagtacagattactgaacatctgaaaccacaatgaaactactacaaaaaagaaaggaagtacgaccatctagtaatgcatttatcgtatcttcttgtttaagatatgtaccgaaggaaaacttacatggaaaagaattccctgtagctgatctcggaattcagaaaatcttttccttgtgtccacctcatagaagaactttgcatcttcataacgtgccctgcaaaagtaaaacatgacctttggatgctttaaatatggaccactatcaagacttgacagtaaataagtagggcaatgaaaagagctagaagaataaagatgtgccaagaaagatctactatcaatttgagtaaaaagatttagccacttataacacatctcaaaaacctgagaactgcttcatttcctttcttcaccacatcctcatttattgcaccattggcaacctaaaacaaagtcacactatgttttatcagctattaaaaacttgtttctgtgcaattaaaaatgaaaacaaaatatgcagcagaagacagtgcaaggctatagtttcgtacagcaataaagtaaggcaatagctgtccactctcatcaataatggaaaaatacttctggtgcttctgcataacctatagggttacaccatagttaggcctaaataaataagcatacttgctgacaaatcataagaaagtaaacagatgttatgggcagttacacggcagttacacggaataaaaaccaatcttagtttctgaagagcttacaatagttaatagctcctctggaagttctaagaatgattccttgaactttccaattaagggcacaggagcttcgacgagatttgcaacctgcaaaacaccataaattaattagcttcttggtatcatgaggaaaatatcatttcttggaaccattggtagagcatatcactgaaaaaacaacatattacttcattaagtaagttctgcggaacaacaaggcgcccactcacactctttgctagtgcatttgacttctcaagaatgattttcttcctttcctgtaaattatagtaaccaatgaaatgactacatagatccataactacaaatccaaattgaaagaaatctgacaccctgctgaaagttaaaaatatttttttaataaataatggatagagaagaatgcacgaaggacatgcctcaatctcaatattgattccagaattcctcatagtatcttcataggattctgcattctgtacctgccaatatatagaagaccataaagcacacatctgaagcatgacatccaaatatgcttacagccgacaatgcagggtatattcttaccaacagtgatgctgaagcagtattgcgaagtccacaagatacatttccactgcattttgaagatgaaacagatagttactttatttacaaatattttgcatattaacatctttccgaagccatataaagcatagagaagcaagagtagccaagtaaacgtaccttgagatgccagcaaaggagaatggcacaaccagatcaccatgtaaggccataacccagcgaatcggcctgctaaacattacctgttaatcacagcaaaagataaagcagtaattcaaaccccttgttttacaacagagtctaggcaatatgaacgaagatgtatacaaatataagttacatactgaagagttccaccgcattgactttgggaacgatattttagccagtataccaggtaaatcttctgacagaacctatataatatacaaggtcccaaaaagaaaatgtatgcttagcaaatagttgtatttttctctccacgaaaaactcagaagccaatatagtgaagtgtgaggaaaagtgtgagcatcatacgaaaagtaagaggaaaagagtgagcatcaataatttgctaagttgggtttttgtccaaaaaaaataaaaataaaaataatttgctaagttaatggatatactaagtctttcatgaaagatgaaaataacagtcccttagcataacaaaaagagtagaggaaaagaacctccaaagcaagtcgagctggctctgtaactcgtgcatgtacatattctgtcttccctgaaataaagacaaaaaaaagataacaatgaaaagaactatataaaaaaaagcaatatcacaacctagaaaacaaagaaaaaggaagaagtctgaagttgggtaacaagaaacaagatcctgctaacagaatatgctaatatggatgcacccaccagaaacttttctgtacaatttttccaatggaacgccatatctgcggctaaaaccctcagcagcctggcagggaagaacaacgagaaaaattatatctacatatctttaggcagtcaatacaagctacaaagaaaaaaataaacatagcataaacctaagcggcgataaataaatgaaccagatactatttctttaattccaccactgtctcccaaaatactttgaatagttaatttaatatccgtgaccaaaagaggaccaaagggaaaacaaaaaaaaaacctttgtaggatttccttcatcatcaaaagctttagaagcagggggtcctcgaacttcaacctcctcttccagctgcttcgaggacatagcatcaactaaaacctgaaaaaggagcattcacttaaaactccttaaaagaagaagaaaaagaataatgaattccagaaaagcttcaagggtgccatgattcatttgaaaaaaaaaacgttcagataaatcaaatttagtttttcatcctcacatgaaaagccagctttaaacctcataagcgaaaattttaaaagtgaacaataatgctaaagaacaaaaaggaagtttgatgttaaccaatcctttctctgtaagattggattcatgcttttatggagttgacatcaattagcaataatatgtaaatgtgaaaagatcttattaattaccactagcctgcgaggtgtgccaaatgctttcacagcaccatgccgcaatctttggttctctagtaattctagcactaagaccctgagctgcaatattaacaaggacagttacttgatgttctattaaaagaacacaggaaaaatggaaaaacaagaagcacataatctagggagtttgggaagttaaaatggtgcagcatgagcgagcggcccacaagtgtccatgagtgagtgatagcgagagaaatgtcaagtttctccaaatgaaatgaaattttacttgttcactagcattgataacatcttgaggtggcatctcttcagtccctatctcaataataaacgatcttggatcttcagaaacctgtaacgattgaacaccacataaacaacaaaaaaggaaactatatcgtatttgacatcttcagaaatatatttctatatcaaaatacccagcttttgatgcgtaaatagaccatataagcaagtaatgctgaagatggcgacaccaaaaattttcacaaactaacatctcacaagtcacaactcatcaaaaggaaataatcattaatcagtaacaaaagctccaattgtaaattctctaattagaaaacaagccaaccttttcagccactttttccagagcagctctgtgacaaacgggaggaactggttcggaggcaacaccaagaggatgtccaagagactcacgtgtcgctaaccacagttgggcacattggcgagccaagctattctttcaaagaggatgcacagaagcaaaaaatgcacatcataaatatttttacaagtaacgacttgtttaaaagcatttcctctctggttaatcaagctcgttggattgctcaataatacactctaaaaaaactggaacagatcttacctacgcattcgaccgaaataacgagcacgttcagttacgccaatgaaacctctagcgtctaaaatgttaaaagcgtgagatgtcttcagaagctggtcatacctagcatgcccccaagcagcaatttgttaaattcaagaggcagtggttaaatatggacaagaaaattgacgatcgtgagcattgtgataaacatacgcagggattggaagtcctaaggcaagcaaggaacgtgcttcttcatcaaaataatcgaaatgcttttgaaggcgatccacactagcatgctctaaataatatgagctcatttccttcctgtaatatccacccaactatcagtctcaaaacacagaataagttcgataatgtttgattaaaaatccataaaagtatatcaggcttttactcattttccaagaaaagctccccataggtgattccatcagcatataagatctttttgaaatggtcaacttcctgtaggttaaaacgaaaggctaacttaacccaaacataacggacctataacggaaaaatgtgtacatcaacaataagggagtataagactgacctgaagtaacatgatgatgcgctcaagcccataagttatttcaacagatactggagacaacggaagacttccagcctagaaagaagcaaacttcacaattatattgttttctaacaaccgacgcagaaaatatactacagaacaaaagataaaatctaccctaagaaaccaaaatgcaaaccgtagtctatagttaatttctagaaatgtttacataaaatgaaaattacctgctggaagtaagtaaattgtgtgatttccataccatccatccaaatctcccagcccaacccccaagcaccaagcacctgtaagaaaccgtatatcgtgtgcagtcattcacatgatcagacacttgcacgctgagagtataatgagaaactaaaagagatggaaaacgcataaaacatgggttcacacattaccgggctctcccagttgtcttctacaaaccgtatatcgtgtgcagtcacatcaatacctaacacataaaaatagtaagggaaggattatctggatgagaaaacttcctaatgaaacataaagacgaccttcacataatcaaaccttaagcaaatcaaaattaacactataaaaccacaaaccagaaccagcacagggtgaaaaattcaatcaattgtgcatctacaaggaaaggaacctattctgttaaaagacatgtaagtggaaacaaaagagaaggcagaaagaatcagtacctagagcagaaagactgttgataaagagctgttgagagtttccagggtcaggtttcaatatgacttgaaattgagtgtgtctttgaagcctattgggattctctccatagcgagagtcgtcaggacgtatgcttggctcaacataagcaacattccatggttcaggaccaagaaccctcaaaaaggtacaaggattcatggtgccagctccgacctcagtgttacttggttgcataacggcacatccaacggaagcccaatattccttcaatttcaaaacaaaagagagtaattcaatttgaattcgtcgaacttttgaaagtagagaattggagatgagtgagaatcgaacgaacctggaggcgttgaatcgcttgttggaatgtaggaacagacaccgcgcgggtaacatcatcgtcgggattacgataggattggtgatgaacagcggcggaggaaacggcggaggtacggtgaaaacggcggcgggagaggaaaggggactgagaaagagagcgagggaggaggaagaagcgaggagaggcgtgaggacgaaggaaagagacgataagaggaagagagaaatggaggatggccatgagtgtgaccagactctttgtagaagagagtcaatgtgtagtgctcgatttttggaagacgagagagatagagagaggttttgtgttatcctttcttccttttttcttttctctctctcgagttcgcggttcgacctaaactatatgattttttcaaaagaaaacaccatttagtctaaaatgtatttgacaaaaaaaaaagtctaaaatgtaaattcactaagcaacaaaaacaaaattgtaagctgtaataatcttgtacatttatagataattattaaataatttcagatatataatcaatgaatgatgaataacaattgaatataagtaattcagttactcacgattatttatagaataggagaattcataaaataaatcgagtatttgtaatccataacttaaaatttctatatcaaaagattacgtacgtagagaaatcaaaatttggaccccgaatataattttgaataatcatatattagcttattgattctcattttataacattttcctttgtcatatagtgaaattgagacacacacaaagaaaagatttttttttttaagtataatacaagaacatttttatttagaccatgctaacatcttcccaattttatcagatgtcccaaaagaacctaatacaacaacatgcatgtaccaattcatatcacatagacagttaacacgaaagttcgttggtttttgtaaggaaaccaataaagcatatttgtcttcagcctctcatactatttgagaggtaaaaaccgagaccattaggattattctttatagaatgttttggtgcctaacaaattttactggcatttcttttttttgccataaactgttaagaggtttatttatgaattgttaacttaatttctttgatcaaacaatagtaagttctataaatgtatcttgtgatctttgactatgatagacactaagctcggactcatgtacatagccaaaacactcatatatattaaaacaataatttcatcggtaaactcatgttgtttccaaatatacaagtagagaaaacgtgtagacttactctgaagggacacgcatatacatactgataaacaaccatcatggagaaatccgagccgtttctctgcaagccaaaccaaatttgacatatatagtaaggtcatgtgctctatacacctagtacctcacattcatttgatatctcctctagagatacatcgatcatagtcatattttcagctttcaatgatgatttagtcattaccattcttgaaatatattggtcgagtttagtccatagatcttcgatcctgtcgtgacaaagccttccatcaattgtcaaaagatctctcacgtgtggaaatactcgatgcgtgttgctaaatatgtgaataaaagaacgccaaatttatagaaaaagcgaattaaaattcaagtaaacatatgaatatttttcaagaaaagtgaattgaaattttattttcatgaaaacttactatttttttttttttttttgaacactcatgaaaacttactattaactcatcaatcttatgccattcgaccacgatcgatagtagaggcaactattatggtacagttacgagatggacaaacaacaataacttgaaaaataatgattttttgttttgtttctagaaatatacacatacggatcttgaatttatctgattgcgcaactagagatatcaacattgaaattcattcgcccaaatagtcaatctggcggtcacatgtcagctaacttttccaacaatgttcattaattaattaacaatctcaaagattttgtagattgaaatacaaatcttctctctgtggtacatttcttgaaaaatgggaaaatcaagaaagtatcgaaaatgtacaaaaataaaaagaaatgaatcaaagtagccatgatcttgacaacaataatcgagagagatcgtcatgatacgatttccctcatccaaaattgattttatttcccttcccaaatcaaacatatcatatgatttcaccactcaccattacttgactattctcaacaaaaaaaatattaaaaaactttatgactttgattttatttttatttgaagtttagccaaaatttgaaaatatgacttttgagaagaaaacagaataaacaaataattagccacgcgctatcagacagacaaaatcccacagatatgcaaagatctctcagaatcctctccccatatcatatttttctcttttccctctccttctttcttcctttataaatccatttattctcctctcatctctcagcaaaatcaaatcctcatagttgattctctctatctctctcacgagtcacgatcctactcttcttgatatggctgaggttttgcgtcccgagatgttagatatctctaacgacacttcttcattagcatcaccgaaacttcttcatgttcttgctgttgatgatagtatggttgatcggaagttcatcgagcggttactcagagtctcatcttgtaaaggtaactgttgtgtttgtgtttatcaaaaaaaagtgttgtgtttgtttatcttgtgtaatctgtttaagtacaagaatctgacattagttttgttctgtctcagttactgttgtcgatagtgcgacaagagctttacaatatcttggattagatggagagaataatagttcggttggatttgaggtaataaatctgatcattgtgtttaatatttttgagagtgagaatccattcaaatttggtgttaaaagatttttggtttgaaattatattttaggatctgaagattaatttgataatgacggattactctatgcctgggatgactggatatgaactactgaagaagatcaaagtaagttttgttgatgattcaattgttttcacaaaattaaaatgaagttctgatttgacgaaaaaaaatttaaaaaaaaatgaagttttgatctaatcttgtttatggattttgaactttttaacaggaatcatcagctttcagagaaataccagttgtgattatgtcttcagagaacatcttgcctcgtatcgataggtatattctactataataatcttaactatgatccttaattcttgtttaggtcaagattatgtaggaccaaaatttaccaaatatagtagattttgtgcatttattacttcaggagatggggatgattagatttagagggtattgtttgtttaggaaactttttaaagtaatcacactaatttaggatttgtgataaagttaccgttaaaggatatgtattgactaaattaaattgttgtataatcacaagattttgttatgatagaaaaggttattatatgattactttttaactatcatggggttaactttggtggtggttgtatatttgatcaagctgagatttggtgtttattttagtgggtcctaaaatgatttttaaaatggatcttaggaataataaaatttatcttgtggccataaatttagaaaagaataatccatcataagttaagcaagatcttctcttgagatttgattctatataagccggtgacatgttaggccctccaaaactttataatatatgttttaattgtttgggttgcataatcttaggtagggtcatttataaaatcccaatcctcgtgatagacacctcacatgcctttgcttattactaaggaaccaaaccctctttaccagattaagtttaatgattatcatatatgagctggccattttctgtatccaaagttataaactttatggaattagatcactaacatttggttccttatatttattcagatgtcttgaagaaggagctgaagatttcttattgaagcctgtgaaattagctgatgtgaagagattaagagattctttaatgaaagctgaggaaagagcttttaagaatattatgcacaagagagagcttgaagctaatgatatctactcgcagctaaaacgcgcaaagatctgagtttatcagattccacgtacgatatgttctttaaaagctcaaagattcacacacatgcatgtcctgattctttcggcttacaatttttgagacattacggcttcttttgctgatagaaccaagactgatcaagagtgacaaagatgggtttttataagatagaaatgtaaattgtagacttggattcattagagaggagaagagatacattttttttttctttacatgagagatatgtaaaatggtggtgtgttattttggaagttaacatatgaatttcttttgttaagattacttaaataatgatttaggaatggattagtagtttagtaccgttcattacacgaagacaagctaatcttttgtctaattaaaataaagctgtctacatgaatcgaatccagcgagataagttagttattttaagcgttggttggaacactttacatggcttttcgtagaaatttccccaagttgggttttattaagaccaagaaaattctagtctcctagacttttttttgtttcttttgttaatttagtctcctaggctttttcattctatctgaaagcaaaatatggttatgcaatttggtttagccaaaaaaacaaactaaatttttctagtccggttcatgtaacttcataatcaaacaagtaaaagtcgaatgtgacgcgtcttgccgaacgcaaaaacggaccaggcaagaaggtgtagttagttaattcggttaatattcagctgagagaaatcgaaccggttccatatcttgtagattatccggtttactttccggataagatttataagcaaaacagagttaaagtagtagatttcttctatacgagaccaaatctgaaaacccaagtcaagctacaaaaacttaactccaagcgaacaaatctcctcattcattaaacaacaaaattgttttccgacaaaaaagtgaatatcattgagttactgcgaaatcccaaccgagagtgacatctcaaaccaaaagatggagtctatattaaagagacgaagactccaaagtcaagctacaaaatttccaagcaaagattacacagagaaaactttccgaccaaatgtgaatgtttatgaaagtttctgcgaaactccagtcatgtcggatgtacaaagccatacaccaatgtaaaaccgacacgtggaaagctaagattcctagcttttctttcttcatgagtctccaatagccaaagagtcaactccaaaaaaaaaaacccatttttgcattgaaatggtctcatgatggggtattttgggtaactaattagtcctgtctacatcttcccataaattaacagagtaggagcggattaaagaagcaagacgattcaaaagaaaaaagagagaagaaagtccactaaagaaaagagaatagatatagatcaatggcgtttgaagctcttaccggaatcaatggtgatctaatcaccagatcatggtcagcctcgaagcaagcttacctaaccgagcgctatcacaaggaagaagcaggagcagtcgtaatcttcgctttccaaccatctttctcagagaaagatttcttcgatccggacaataaatcttcctttggagaaatcaagttgaaccgtgttcagtttccttgtatgaggaaaatcggtaaaggtgatgtagctactgttaacgaagctttcctcaagaatcttgaagctatcattgatccaagaacctcatttcaagcttctgtaagaagattgaaaacatccgaatatatttttctttttttttcttttttggtctcttatgcttttacttcttcaggtggaaatggctgtgaggagtagaaaacagatagtgttcacaggacattcctcaggaggtgcaactgcaatcttagcaacagtttggtatttggagaaatacttcatacgcaatccaaatgtttaccttgagcctcgttgtgtgacatttggagctcctttggttggtgactctatcttcagtcacgcacttgggagagaaaaatggagccggttctttgtgaactttgtctcaagattcgatattgtccctcggattatgcttgctcgaaaggcgtctgtagaggaaactttgcctcatgttcttgcccaattggatcccagaaagtcttccgtccaagagagtgaacagagaataacagagttttacacaagggtgatgcgagacacatcaactgttgcaaaccaagctgtttgtgaattgactggaagcgcagaggcgtttttagagaccctttctagtttccttgagctaagtccttatagacccgccggtacttttgttttctctacagagaagagattggttgcagtgaacaactcggacgccattcttcaaatgctgttttacacttctcaagccagcgatgaacaagaatggtctctaattccatttcgaagtatcagagatcatcatagctatgaggaactggtacagtcgatgggaaagaagttgtttaatcatttggatggagaaaactcaatagagtctacgctcaatgaccttggagtggtaagtctctctctctctctcttttcatactgtgcagctccatagctccattcttgcaatcatttaaacccttcagagtgtttcctttttctgcagagcacaagaggcagacagtacgttcaagctgcattagaggaagagaagaaacgagtagagaatcagaagaagattattcaggtttgtggttgataagcttgttcatgaataatgcaggtacgtgcttcgtctgtttgtgtctaacaacataaaacttgttggttctgtggtttttaggtgatcgagcaagagaggtttttaaagaaactagcatggatagaagatgaatacaagccaaagtgtcaagcccataaaaatgggtattatgattccttcaaagtttcaaatgaagagaatgacttcaaagcaaacgtcaagagagctgagttagccggtgtttttgacgaggtgcttggtttaatgaagaaatgtcaacttccagatgagttcgaaggggacatagattggatcaagttagcaactcgataccgcagattagttgagcctcttgatattgcaaactaccatcgacatttaaagaacgaagacacagggccgtacatgaaaagaggaagaccaacccgctacatatatgctcagagaggctacgaacattatatactgaagccaaacggaatgattgcagaagatgtattttggaacaaggtaaatggtcttaacttagggttacagctagaagaaattcaagagactctaaagaattcgggatccgagtgcggatcatgcttttgggctgaggttgaagaactcaaaggaaagccatacgaggaagttgaggtaagagttaagacattagaagggatgcttggagaatggatcacagacggggaggtagatgataaggaaatatttctggagggttcaacgtttagaaagtggtggattacgcttcccaaaaatcacaaatcgcattctcctctgcgagactatatgatggatgaaataacagatacctgaaccttaggtggtggagtatttaagctattagaacacttgcttctcttaatttgtgcaataagaaatgtttatcaatctggtttccacttcatgatgatcttagaataagaaacatgttgtatgatcattgtgaagtaatgtaatagctctctattctaatgtcaaatttggtttccactttacagtgatcttagaatatatacgttactctactaaagcctaaagccatctcaaatagcatgaaccagtaacaaacaaccttccttagattgaaatggtctcatgatggggtattttgggtaattactcctgtctacatcttcctactatattaacagagtaggaggactaagaatcaagacgactcaaaagaaaaaagagaagaaagtccactcaagaaaagagaaatggcgtttgaagctcttacgggagtcaacggtgatctagtcaccatatcatggatggcgtcgaagggagctaaccaaacggagcactatctcaaagaagaagtaggaggaaccgtttttttcgccttccgagcatctttctcgtcggaagatttgttcgctacggagaatacatctccctttggagaaataaagatgaagcgtaatcaatttccttgtatgagaagcatcggcaacgacgttgacactactgttaacgaagctttcctcaagtcacttgaagttctcattggtccaagaacctcatttcatgcttctgtaagtaaacaaaagcttcttaaatgcgttttaaatcgaaaacatcagaataatttgtgtctgaaacttactttcttcaggtgcaaagcgcggttgatagaaaacaacaggttgtgttcacaggacattctttcggaggcgcaactgcaattctagcaacagtttggtatttggagacatacttcatacgtgacgcctatgctgcccctgagcctcgttgtgtgacatttggagctcctttggttggtgactatatctttaaacacgcgcttgggagagagaattggagccggtttttcgtaaactttgttacaagattcgatattgtccctcggattatgcttgctcggaagacaacgatagagcaaaccctgtcttacgttcttggcaaattggattctacaagagctccgatccatgagagcgaccaggtgataacagaattttacacaagggtgatgcgagacacatatactgttgcttccaaagctgtctgtcagttgattggaaacggagaagcgtttttagaaactctttctagtttttatgagctaagtccttatagaccagtaggcacttttgtcttctctacacagaaaagattggttgtagtgaacaactcagacgccattcttcaaatgttgttttacacttgtcagtccaacgacgaacaagaattgtctgtgattccatttctaagcattagagatcaccatggctatgaggaactggtacaatccattggtattaagttgcttaatcatttggatctgcataatccgcttttggatggagaaaactcaataggctccgctctcgacgaccttggaatggtaaatctttttctcttttcaatttgtgcagcttcattagctccatccttatttatgtttccttttttgcagagcacaagagccagacagtgtattcatgctgcattagaggctgagaagcaacgagtggaaaatcagaagaagatagaaaccaaaagagatcaaatagtagaaagactaacttggatagtggaagtatacaagccaaagtgtcaagctcataaaaatgggtattacgattccttcaaagattcaaatgaagagaatgacttcaaagcaaacgtcaagagagtggagttagccggtattttcgacgaggtgcttggtttagtgaagaaaggtcagcttccagatggattcgaggggagcagaggctggatcaatttagcaactcaataccgcagattaattgaacctcttgatatttcaaactaccatgggcagttaaagaacgaagacacagggccgtacatgttacatggaagaccaagccgctacaaatacgctcagagagggtacgaacatgatatattaaagccaactggaatgatcgcaaaagatgtgttttggagcaaggtaaatggtcttaacttaggattacagcaagacattcaagagatcttaaagaattcgggatccgagtgcggttcatgcttttgggctgaggtcgaagaactcaagggaaagccatatgaggaagttcaggtaagattcaagacactagaagggttgcttgaaggatggatcaaagacggggaagtagatgagaaggaaatatttctggagggttcaacatttagaaagtggtggaatacacttcctgacagtcacaaaatacatgctccgctgtatccacgtgagcgtatgatggatgaaacaagagctacctgaaccttaaatggttcgattattgaaacacttgcttcttaatttgtgcaataagaaatgtttatcaatctggtttccacttcacgatgatcttagaataagaatcatgttgtatgatcattgtgaagtaatgtaatagctctctattctaatgtcaaatttggtttccactttacaatgatcttagaataaatacattattctaaagcctaaagccatctcgaatagcatgaaccagtaacaaacaatcttccttagtgttgacagaaggaaagaggaccagaatgtcatcagaatagagcctgaggttacttcaattgtttataacattactaacctctatacctcaaaacaagtggctgtgcaaacgctccaagttctagctactacataaccaaagaagaaaacgattaaaacacaaaatttgaaacttgccctatgcccctctgtatgctagttagctcgatatgaaagtttgactcaagtatgtctcctaaacacaagtaaataaaagagtaatcacattaccaagacgttcctgttagatttgcgttccaccagaatcctgcatcagtataatcaactcaaggatgcataccatatagctaaggaggaagtagatcattcacaaaagaatcagacaatagaagtaatcttcaactctttcgcgcgaatgtcaattttatatataaccaaacttgactgtctatatgctgtatttagtcgctcaacatagaatcaagtagaatgatataacatctatggccaccttaaaataacagacgacataaaatgatacctttagagtattacagataagcaaggttctcgcaggctatgagaaagagacttattgcaacttttatgtatttgaaattcgtgtaccaccttatgtactcacacaccactctacataaccaccaccaccaccaccacatgtttcagatgaagaagagtcattgacatagaagaacatagaacatagttctcagttgccaaaagacaaatccctatacccatatctaaagagttttaaagacaggtgaaaaacgtagaacatgcgaggaaaacaatgaagaagagagaaaacaaacagacacaggccgagaaaagccacacatcctttcttcatgacctgcaaaacatgctagacgaacgagcaagccgaatagtcagaccaccaccttgaacactagcttcaaacttgattgtgttcctttcataaggctttctgcaaccaggacaacgcccatctccatcgcatatcgtcttgtggcagaaaaggcaaagccggaatccacaaggacatggcaagaaatttgagtctgttaagtcaagatcttcgtagcaaatagggcacgaagatggcaccacagtcacagaactaaaatgcaaattcatgaccggaaaactacgctgcttttccaaattaggcagaccctgaggacggagcttatcgtctggcctccacgcctggttactcttttgcttccttctctgagaatccgcctttgcatcccttaaaaccacatcagctccaccgattaaagctgattgcttgatatcctcatgctcttggcaagactcaggaggattctctttctcatgcttttcatcatcagcagctaaagcatcagcaatagcttcccaatcatccaaacaaccatcatcatcagcatcttcctcctctgttatattaccagagcaagagccaccacttccactgctactgctgctgctaaaattaggaattgaattcatgccactaagaatactgttagggctattagaaagtgactcaataaagctctcatgacgatgtgttccattgttatcctcatctaaattctccaccggacgcggaagatctctctgatcaggcttttcactcccaattcttcgattggattccatttcctccttatcccctttgttaatcatcgcaactaataacaacaaaaacccaaatcaatataaacaaaatccacatgtaaagatagatcatttaattttaccttgagaaagccattgttcacgacgaagacctagcttgctctgtttcaatttggccgacctgttcgtctgcaaacccaaagagtgaaatcaaatctttgaagagagaaatgagatttgaggaaggattgaaaacaatacccttttcttttttccgaaatccctggcggttggagctgaagtagcagaagcgttggtgatcgaatcagaaatcatggtggttgcagatgattccaaagcaacaacaaaatcaaatacaaataaatttcaaaatcacgaaatgaagatttctcaaaaaccctaatacagatttgttgcgagagagaagaagaagaagaaacgtgcgattttttatttttttttgctttgtttgttgtgtctgtgagagaaaacgagagagagagagataaaataaggggataacggaaactcctcgtctccgcacagaactttccttctgactaaagtaccctttcttttgacttttgcacacgctcgaatgtaggggtggttttgtaattgtgatggatctacacgtgtgagaaacttctgttcatttaaaaacggtggcgtacggtggactacacgtgaggatagttcatatgattcacaaatatcagcgagcttctagatcaatcagctgggtttcttctggttacagaaaaaattaaatgatttagaaaaacatcaaaaccacaaagtcaaagttgtgtctctttctttcaatttgatgaatcgatcaaacacatttttatcttatattttgatgtaacaacaaaacatgaaattaaacaggttaaaatagcttatgaaaattggtattagggagctaggaaactgcagatgagagttgaacaacatttaggtaagtttttaactaagtcatgattagtttattgtattttgaacattaacctgcaaaattaattactactataataagaaatcttaggtagcaacatgaaaaaagtaagaatgctaattaacaaattacattaaattttagaaagaaaaaaaataacatgttaaacaatattttttattgcatcaacatagttctaagttatgaaatgacataggatgataaaaatcgattttagtgaaatgacatgtaacttgtaatggtgaatcagttacatggtttaccatactttagagtgtatataacttcaatcgatcagtgaaccatttaagattacgtaaagatacatcaagtgcattaagagagaccaattgatctactcgacacaaacagagagtataagctagtgtctaagattgaccgataaataataataatacaaggatttggatttaatccttcaagccactctaacaattccaaaggcatgaagacagattatcaacatgaaaagctgaaacatgtggaatgttttttaattccacaattgtccaaaaaaaacaagcttttatgactttattacaagctaacacactgttcaatatgaaatcaagaaaagaatgaaaaaaaactgaaattaaagaataaatcctactcgaaatagacaaaccaacacgatggttcaaaagaaaaggtgaagttgagcagaatctgacttaacacaacaaacaaacaaaaacccacagaataatattcgggaatctacctgaaaaagagagcaagacacgcatcaatggaaaaagacttttatggatcagagatacaaacagagttttgatatgttatctcacatcaattgcagttcttgtgtacaaaaggtaacgccacacacactctcgatgaaagaaagagatttctgagtaaatggaatattaaaaaaagtatgtttgtttgctgcaatgcaaaagtcgaggttaaattcaaaaagcaaacatatacatacacatatgtgtgttacctttttcctagacaacaactgatcaaataaattactttattattagtatgaagtctgaactaagcattttccaaacagtttacattggctaatcgatcgaagtaaacgaacaatgtccagtgagcttaattatgcactagtgactagtgttataaacttcaaagggagtccaaatttcagcttataaaacctcgtaccgaattatgattatattagcgaaactggttttgggttaaaaacataacacatgtttatatagatagatattacatgctaacaactcatgatgagtagtaatgtgcaatgttagaaagtatggttcgttttcagaatccacctaacggttggaataactcgaaatgtacccatgagtttcctatctatatttagaacgacatgcataatcttgattgtgacactcagtaatatttctctctaacccgacccgacccgcccgaactctcccaagttacctttccccttttcgaccgtttctctctctctctctattctcttcttcgatttattggtgttttgttcgcttacgcgatttctcgaagaaaaattctcgtattcctggatcgaaacaaggctgattcggttactcgctgttgctgttgttgattttggatctgtgttttgttatctgcggatcgggaaattggaaaaaaacctagatatttgagccatttcgtcgcgaaattaggtttttttttttcaccggtgggtttttggatctaaaggtatcgaatattgtctggggaaaaaaggaattttgaggatttgtttgattttcgctgaggaaattgatgttgttcgaaggagaagatgatagaaggctatgcatgggagggtttgtgagcggaggcacaaaagtcgtcgtcggcacatgttgatatcttcctctcgtgtaattgcgactgtggaaggtggtggttcttcttgtttgtccttatcttcatctacctcgttttctaaggtaagttctattcgatttcgtttcgatttcctcaggcgttttttttttctttcgtgtttccttctgttttggtggatgggtttgcccaaagttttgaaatttcgtctggattttgtgattctattggttgattcgagaaaatgagtttttttttttttttttttgggtttgctcttcgacttatagttttgtttggtgtttgctgtcactagcaggacgggcgcaaaattagtgttggtgactgtgctctgtttaagccaccacaggattgtccaccgttcattgggataattcgcttgatcattgctgaggaagaagataagttgaagttgggtgttaattggctttatcgacccactgaattaaaacttggcaaaggtatccttctagaggctgagccgaacgaactcttttattcctttcacgaggataatatacctgcagcatctttactgcatccgtgtaaagttgccttccttccaagaggtgttgaactgccatctggtatcagctcgtttgtgtgtcggcgagtttacgacgttacaaacgagcgcttatggtggctgactgatcaagactatattgatgtgagattataactcatcaccaactgccttcttctatttggatttatggctttctctggtaactaaggcatttttttcctctttgcaggatcgacaactagaagtagacaagttattgtgtaagactcgttcagaaatgcatacaacattacagcagggtggtcgttctccaaagtccatgaatagtccaacaacatcacaaccgaaagatggcatccagaacaacaactctcttttctctcagagtaagggaaggaaaagagagcgtatggatcatggttctgagtctgttaaacgggaacgttctagtcgagtagatgacagtggttccggtcccctcagaaccgaaagcggtttaacgtctgagattttaaaatttacagagaaaggtggtctggtggattctgaaggagttgaaaaattggttcagctcatgctgcctgagaggaatgaaaagaaaatagacttagttggccgtgcgattcttgcagggtttgtagcagcgacaaacaggtttgattgccttagtcgttttgtccagctcaggggattacccgtgtttgatgagtggctgcaggaagttcataaagggaaagttggggatgggggcagtcccaaagacagtgataggctagtagacgatttcctcttagtcttacttcgggctcttgataagctaccggtgaatctcaacgcgcttcagacttgtaacattggaaagtctgttaatcatctacgctcacataaaaattcagagattgggaaaaaagcaaggagcttggttgacacttggaagaaacgagttgaggcagaaatggatgcgaagtctggatccaaccagggtgtttcctggcctggaagactgagtcatgggggaaggcattcaggtggttccgcggaggcaaacaagacatcatcatcacacctacatgcttctaagtctgtctcggtcaaacaacaggtggaaaacaacctgaagtgtgtagccacgtcgccaggctccacaagatcagctccttctccgggatcaggtggtaatgtttctaaagatggacagcagcgaaatgctggggctggtggtgtatctgaagtcctagctgcagtaaaggatgagaaaagtagcagctccagtcagtcgcacaataatagtcagtcttgctcgagcgagcatgctaaaacaggcaatttatgtggaaaagaagatgcaagaagctctactgctggttcaactttgaagaagtgttccggtggctcttcaaggcatcggaagtcaaacaatgtgtttcaaggttcgtcttcgtcagcatcccctaggggagctggtttgagtagaagcttctcatcacacaggaatgtcccttctgagaaaatttctcaatcaagtttgacatctgaaaagactcttgaggttcctctgactgagggttccggtaataaattgattgtgaagctgccgcggggtcgaagtcctgctcaaagtgtgagtggaggctctttggaggaccctgcaccagtgaatagcagagtttcttcacctgtgcatacggtgaagcaggaactgtgtgacaataactggagagaaaaaaatcattcttatcgagctgatgtgagctctgtcttgaatgccgagtcttggcaaagcaatgaattaaaagatatattgacaggctcgcaagaggcaactggttcaccacttgttgttgctggtgatgagcgcgaaggggctcttaaggattctgataaagcatctgggaatgttaaagccacatcttcattaggaaatgagttcaaatctggagaaagacatggcggaacactcagttcgatgaatgctttgattgaaagttgtgtcagatactctgagacaaatgcctctttggctggttcggatgatgttggaatgaatcttcttgctagtgttgctgctgatgagatgtctaaatcgcctgttgcatcaccctcagtatctcagcctccaaattccttgatgaatgaaaattctactgtagggaacaatacaaagctaatggcttcggatggcttgcctcataagcaacatcaagctgttcgccccactctcagtaatgagcaaggtgagcaacatgttagcagtagtggcacacagttggagtcagagataaaaaatgaatctaagaccggagatcgtgttaagagctcgaattcagacactgaagatctgcaaaggtttgtggatcagcgcctagagagcaatgaaaattcagatggtgtcgttgcttcgcctcctttacccacaaaagtcattaaggaaaatattttggatgatagtgactctggagaagtgaaggatataaagactgatgttaaatcagaggctgattgcacatctgacttaacaaaaagagtagcaagctcaatgctaaccgaatgtagagatgtaagtaaaatggtagattctgtggctgttgaacatactcccttggaaggtgttgatgatgataagaaagaagagaaacccccaacggcgttgagttctgagctagttaaaaaagtggaagaagatgtacccgtttcttctgggatttcaaggggtatggatgctgtaagcattgatagacctataactgaaatggtcaataatattgcgtttaatcatatggaccaaaaagatataaagaagattaagcaggattttgatacttctgtgggagctgtaaaggatgcctcagccggtttggactcatctgtaactaaaggtaaagttgagcctgtggaggggaatctagaaaatattgaaatcatggaacggtactcaggattaagagctactccaggattatcacctaaagaagcagaggatcttaagagaccgaatgcgcctaaaaccagtgatgctgatggagatgaagcgggggaatgtacgtctgctgccagagatgcttcttccgtttcagctgcagcttcagcttcagctggctctgagatggatgccagagttgaatttgatctaaatgaaggttttgatggagacgatgcacaacatggggactcaaataacttctctggatctgtagttttgacgcctactcctctacaaccagttaataccttaccttttccggtggctcctgtatctagtggaattcctgcatccattactgttgctgctgccgtcaaaggtccgtttgttccacctgaagatctgttgagatataaaggggctgttggttggagaggatctgctgccactagtgccttccgcccagctgagccaagaaaagctcaggatgtgttactgagcattaacaatacctctacatctgatgcatctacttctgctggcaaacagacaaggacgtttctggattttgacttgaatgtacctgacgagagagtccttgaagatttggcttcccaaagatctggaaatcccacaaattgtacatctggtatcacaaataattttgaccaagtacgttctggggtcatgggttccgcccttgatcattcttctggaggccttgatctaaacaaagttgatgatttaactgatatgaacagctacacaatgaacagtagtcatcggctagattcatcttttcagcaggttaaattaccatcgactggtggtcgtagagattttgatttaaatgatggacctgtgggtgatgatgcagctgttgagccatcgatggttctaaatcaacattcacgaagtggcttgccatcacaaccatctctctctggaattcgagtgaatggcgaaaacatggctagtttctcaacttggtttcctgctgctaacgcttattcagctgtgagcatgcctccaattatgcctgagagaggtgatcagccttttccaatgattgccactcgtggcccacagagaatgttgggtccaacaactggtgtttcctcattttcccctgaagggtacaggggtcctgttttgtcgtcgtctccagccatgccatttcagtccacaacgttccagtatcctgtctttccttttggaaatagcttccccgttaccccagcgaatttccctggtgcttctacagcacacatggattcttcttcaagcgggagagcttacttccccggtgtcaactctcaaatattgggtcctggagttccagttccgtctaattacccaagaccttatatagttggcctcccaaacggtggtagcaatggcggtgttttggacaatagcgcgaaatggtttaggtcaggacttgacttaaattctggtcctggaggtcatgaaacagagggaagagacgaatcaacacttgtatcaaggcaattatcttcatctgcttccgtaccgtcgaaggaggatcaagcaagaatgtatcaaatgtcaggtggtgttctgaagaggaaagaaccggaaggaggatgggatggatataggcagtccttataacaataacaataacacactttaggtcatttttcatgcatgtgtatctatctctatacaccggctcaaaaaactagcgataaaacaaatgttagtggcttttgagtgtgttcaaaatgatttataaaagaagtcttcggcattgtggccttacatgtgttgcgttaggtgatgggggttgtactatagacacaagattagttaattctataagggtcaaaccaattcgaaacaaacaaacatcagggtcacatatactcatctctgccaaagtctatgtatattccgactcatcagaaccacaaaactgggcaattagaaaaaaaagaagtgaacaatcatcagatggaattgactcatcaattcttcccacacagaatgtttctgcacaatagagaagccaatttataatcgttatacaaacatacaaaactgtatgaagaagctaaaggttggataaccaatgtctagtattacataatatcttagttatatattaaaagagtgaagattatttcaagttacgagagacatccgttgcgaggcttatgcttcttcttcttctccttttgtttcactgctggtttaattactactttgatagcagcatcaaatatggctttcacattctgcaaaagccataaaccaaagaagcatatagtttgcaagtaaagagtcaatgactcctaaatttccaaacacacatgtacaagtgtacctgttgagtttttgagctacattcaatgtaataagtcgctccgatatgcttgcggagttcctctccctatcacacatgaaacatgaatgaatttccaacggcaccacgaagccattctaactcaacaaaagcaaataactttcaacgaagaaacgcacaaaaaccagagagattgtgaaatagagagataaaatgaagtgattaacatgaggaagtgtggagaatgtacttcatgttatttttgaaaatctcaaatctgtagtcttttagatcgagcttcacaggaacatgatgatggcttgtccacctgctgtatagctttagtaatagatggatgagccaccatttggttccaatgaagctcgacctaaaagaaaatagatatgaagttttcagaaataacgcgaagttgttgggcattcgctgctaggcacctattgaggggattaactacgaaagtacgacccagttggtgatgttttctgcacaagaactaatttctgcagacaaagtcaccaccaagtttggcactcaaattcatcaagaaaaatgcaacccttttaaaggcacaaaatgtgaggtaaccatctatcaattcagatatgtagatgtagatctttcaacgaggcagccttatcaacgctattgcaatccggctttttttatcaaccacacattaattaaaagatgattccatgattggttacccaatctggaagaaaagagtttagatacgtaacttcagaaaataataatttagaaaaacgcggtagacaatccgccctaatattactcaaacgagaaatagaagatatcgaaaaagaggaaaaatattacggagcgatccaaactcatctagaagattggagaaagcgtgtcattcttcaagagactgcaccatcgagactagctctgtgcaatctgattcaaatgtctggcagtcgatccttcgtgaaaggatattcttcataacccaaattaaagcttccagctccgagtgaaggggagaagggctcctccagaggcactttgcacataagagtactgtttgatcaattccttgaaaacaccaccatcctaatcccatggttagatccgaagatttccatgatccatcaaccctacatctaatagaatgagtcagttgatccatagacaccctggtaacattcgattcaatcggttccagttgggccgcatcccacaataattgttcactcaaagcgacatttagaatatctaaaggttctgattgtaaacctttgaaaacctttttattcctatctttccaaataaactataaaatccatgcataaaagttatttccctctctctcatctattggagatggtaatccacaaaaaaagtaatgaagatttgaaaattccgaggttaaaggaaagcttcctgctattacaggaatcgaagacatttcccagacttgtcgagagtgaggacactcaaaatctattttttgtagtcaatttttaaaaaatatagtcagcctagtataactattcatgcttatggatatatttcgcaaggagtgatgacgaaaaactctggaacggatttgaactacgcaatgcctttggtcaagtacgggatgaggcagaacgggatataaatattggatagctaagaattcgtatagtccccaatgtggagaaggcgaatatattaggatcgagagagggattgctgattcaaacttggttacagaagagagacagagatgttgttaggattaaaacaaaattggttacacaatatagtgcgaccaaaaaagaaaaacatgcaattttacaaaatatggttgaaacaaaaggcccatgtcttttggtcctcaaaaactatttttgtgaattcagttgatgatacaaaaatagaaattcggtaaaataaacaatgatgcggttagatgtggtaagagataccgattaaatataacgacatgataagaaaaaataaaaatggactaaaaatactattaattttaaaaagaaaacaaattttgacagcaacattaaacataacaattttgctgtggattcaatggatgcttggtttcgttttgacggtaaaagaacaacttcgttttttctaaaggggcataaggttttgtgaaagaattataaaaaaaaactgttttgccaccatttttgttaatcgacttatcatatagcacttgtttttactagtgatatgcaatattacaactttttgtggaagaatatacaaacacacaaatcaaaaatccaagtagttattcatctaacttatttgtagttgatgaatggttatgtgtggttgagacaataaatataaccaagttgtaccgaatgaattggccatcactctattttaaacacaaaacagtgactatacacaatttcttaaacccgattgaaaaataatataaattggacaattaaaaaaaaacttctgacaagttttttggtttatttcggttcttcaaaccggcttgcatagaatcaaattttaattgtaaaacaaaaacaaaaaaagtaaagtcaaaaggagtaaggaaacgtggtcaaaaccgtccgtcactcacccacctcttaatctctccagtccctatgtcacctgaaaaagattggagatgacgtcacgcccatattgttttttcatttaagtcaccgcactgtcacgttatctttgccccttccatccacaactcctctctctaacccgacccgatccgcccgaactcgtccaagtcacctttcccctttttcgccccgtctctctctctctctctcttcttcgatttattggtgtttggttcgcttacgcgatttctcgaagaaaaaatctcgtattcctggatcgaaacaaggctgattcgattactcgctgtcgctgttgttgattttggatctgtgttttgttatcttcggatcgggaatcgaagccctagagatttgatccatttcgtcgcgaaattaggttttttttttcaccgataagtttttggatctaaagttatcgaatattgtcagggggaaaaaggaattttgaggatttgttggattttgctgaggatattgatgttgttcgaaggagaagatgatagaaggctatgcatgggagggtttgtgagcggagacacaaaagtcgtcgtcggcacatgttgatatcttcctctcgtgtaattgcgactgtggaaggtggtggttcttcttgtttgtccttatcttcatctacctcgttttctaaggtaagttctattcgatttcgtttcgatttcctcaggcgttttttttttctttcgtgtttccttctgttttggtggatgggtttgcccaaagttttgaaatttcgtctggattttgtgattctattgcttgattcgagaaaatgagtttttttttttttttttgggtttgctcttcgacttatagttttgtttggtgtttgctgtcactagcaggacgggcgcaaaattagtgttggtgactgtgctctgtttaagccaccacaggattgtccaccgttcattgggataattcgcttgatcattgctgaggaagaagataagttgaagttgggtgttaattggctttatcgacccactgaattaaaacttggcaaaggcatccttctagaggctgagccgaacgaactcttttactcctttcacgaggataatatacctgcagcatctttactgcatccgtgtaaagttgccttccttccaagaggtgttgaactgccatctggtatcagctcgtttgtgtgtcggcgagtttacgacgttacaaacgagcgcttatggtggctgactgatcaagactatattgatgtgagattataactcatcaccaactgccttcttctatttggatttatggctttctctggtaactaaggcatttttttcctctttgcaggatcgacaactagaagtagacaagttattgtgtaagactcgttcagaaatgcatacaacattacagcagggtggtcggtctcccaagtccatgaatagtccaacaacatcacaaccgaaagatggcatccagaacagtaactcttttctctctcagggtaagggaaggaaaagagagcgtatggatcatggttctgagtctgttaaaagggaacgttctagtcgagtagatgacagtggttctggtcccctcagaacagaaagcggtttaaagtctgaaattttaaaatttacagagaaaggtggtctggtggattctgaaggagttgaaaaattggttcagctcatgctgcctgagaggaatgaaaagaaaatagacttagttggccgtgcgattcttgcagggtttgtagcggcaacagacaagtttgattgccttagtcgttttgtccagctcaggggattacctgtgtttgatgagtggctgcaggaagttcataaagggaaagttggggatgggggcagtcccaaagacagtgataggttagtagacgatttcctcttagtcttacttcgggctcttgataagctacctgtgaatctcaacgcgctacagacttgtaacattggaaagtctgttaatcatctacgctcacataaaaattcagagattgggaaaaaagcaaggagcttggttgacacttggaagaaacgagttgaggcagaaatggatgcgaagtctggatccaaccagggtgtttcctggcctggaagactgagtcatgggggaaggcattcaggtggttccgcggaggcaaacaagacatcatcatcacacctacatgcttctaagtctgtctcggtcaaacaacaggtggaaaacaacctgaagtgtgtagccacgtcgccaggctccacaagatcagctccttctccgggatcaggtggtaatgtttctaaagatggacagcagcgaaatgctggggctggtggtgtatctgaagtcctagctgcagtaaaggatgagaaaagtagcagctccagtcagtcgcacaataatagtcagtcttgctcgagcgagcatgctaaaacaggcaatttatgtggaaaagaagatgcaagaagctctactgctggttcaactttgaagaagtgttccggtggctcttcaaggcatcggaagtcaaacaatgtgtttcaaggttcgtcttcgtcagcatcccctaggggagctggtttgagtagaagcttctcatcacacaggaatgtcccttctgagaaaatttctcaatcaagtttgacatctgaaaagactcttgaggttcctctgactgagggttccggtaataaattgattgtgaagctgccgaatcgtggtcgaagtcctgctcaaagtgtgagtggaggctctttggaagaccctgcaccggtgaatagcagagtttcttcacctgtgcatgcggtgaagcaggaactatgtgacaataacgggagagaaaaaaatcattcttatcgacctaatgtgagctctgtcttgaatgctgagtcttggcaaagcaatgaattaaaagatattttgacaggctcgcaagaggcagctggttcaccacttgttgctggtgatgagcgcggaggggatcttaaggattctgataaagcatctgggaatgttaaaggcacatcttcattaggaaatgagttcaaatctggagagaggcatggcggaacactcagttcgatgaatgctttgattgaaagttgtgtcagatactctgagacgaatgcctctttggctggttcggatgatgttggaatgaatcttcttgctagtgttgctgctgatgagatgtctaaatcgcctgttgcatctccctcagtatctcagcctccaaattccgtgatgaatgaaaattctactgtagggaacaatacaaagctaatggcttcggatggcttgcctcacgagcaacatcaagctgtttgtacctctgtcagtactgagcaaggtgagcaacatgttagcagtagtggcacacagttggagtcagaaataaaaaatgaatctaagaccggagatcgtgataagagctcgaattcagacactgaagatctgcaaaggttggtggatcagtgcttagagagcaatgacaattcagatggtgttgttgcttcgcctgctttacccactaaagccgttaaggaaaagattttgaatgatagtgactctggggaactgaaggatataaagactgatgttaaatcagaggctgattgcacatctgactcaacgaaaagagtagcaagctcaatgctaaccgaatgtagagatgtaagtaaaaaggtagattctgtggctgttgaacagactcccttggaaggtgttgatgatgataagaaagaagagaaacccccaacggcgttgagttctgagctagttaaaaaagtggaagaagatgtacccgtttcttctgggatttcaagggatatggatgctgtaagcattggtagacctataactgaaatggtcaataatgttgcgtttaatcatatggaccaaaaagatgtaaagaagattaagcaggattgtgatacttctgtgggagctataaaggatacctcagccggtttggactcatctgtaactaaaggtaaagttgagcctgtggaggggaatctggaaaatagtgaagtcaaggaacggtactcaggattaagagctactccaggattatcacctaaagaagctgaggatcttgagagaccgaatgggcctaaaaccagtgatgctgatggagatgaagcgggggaatgtacgtctgctgccagagatgcttcttctgtttcagctgcagcttcagctggctctgagatggatgccagagttgaatttgatctaaatgaaggttttgatggagacgatgcaaaacatggggactcaaataacttctctggatctgtatttttgacgcctactcctctacaaccagttaagaccttaccttttccggtggctcctgtatctagtggaactcgtgcatctattactgttgctgctgctgccaaaggtccgtttgttccacctgaagatctgttgagaaataaaggggctgttggttggagaggatctgctgccactagtgccttccgcccagctgagccaagaaaacctcaggatgtgttactgagcattaacaacacctctacatctgatgcatctacttctgctggcaaacagacaaggacgtttctggattttgacttgaatgtacctgacgagagagtccttgaagatttggcttcccaaagatctggaaatcccacaaattgtacatctgatatcaccaatagttttgaccaagtacgttctggggtcatgggttccgcccttgatcattcttctggaggccttgatcttgatctaaacaaagttgatgattcaactgatatgatcagctacacaatgaacagtagtcatcggctagattcatcttttcagcaggttaaattaccatcgactggtggtcgtagagattttgatttaaatgatggacctgtgggtgatgatgcagctgttgagccatctatggttctaaatcaacattcacgaagtggcttgccatcacaaccatctctctctggaattcgagtgaatggcgaaaacatggctagtttctcaacttggtttcctgctgctaacgcttattcagctgtgagcatgcctccaattatgcctgagagaggtgatcagccttttccaatgattgccactcgtggcccacagagaatgttgggtccaacaactggtgtttcctcatttacccctgaagggtacaggggtcctgttttgtcgtcgtctccagccatgccatttcagtccacaacgttccagtatcctgtctttccttttggaaacagcttccccgttacctcagcgaatttccctggtgcttctacagcacacatggattcttcttcaagcgggagagcttgcttccccggtgtcaactctcaaatattgggtcctggagttccagttccgtctaattacccaagaccttatatagttggcctcccaaacggtggtagcaatggcggtgttttggacaatggcgcgaaatggtttaggtcaggacttgacttaaattctggtcctggaggtcatgaaacagagggaagagacgaatcaacacttgtggcaaggcaattatcctcatctgcttccttacctttgaaggaggatcaagcaagaatgtatcaaatgtcaggtggtgttctgaagaggaaagaaccggaaggaggatgggatggatataggcagtcctcatggcaataacagtagctcagaatctcagtaggccacatgagcttgtaagccctcgaaatccacaaaccttagtgttttatgacctctctttttgtttttctctctcttactaatgtttcagttacatttttactctgctagttactaagagatgagagtgaatgtgatgccacaaggcttcattggctggcctgctctgtacaaatgaggcatgggtgagtcaatttgcgacttcacagtggtctcaacctttttaagaacacaaacctgacctcttggtttcaccatcatgtagatcttccaaaaacagtcctaaattcaccggagtggccattctctttcagaagagtcatcaacaaggttctcagcgagagacccgcatcaccacctccccacaaagagttttaaaaggtgaaaacacacttttaggtcatttttcatgcatgtgtgtatctctatacaccggctcaaaaaactagcgataaaacaaatgttggtggcttttgagtgtgttcaaaatgataaaaaaaaaagtctttcgcattgtggctttacatgtgtgcgttaggtgatgggggttgtattatagacacaagattagttacttctttttatctttctttttccagtttgtagatttattacttcttgtgctggttctgtttgaaatttacaggcttcttcttacttgtcacgcttttgtcgtttggtcttggatctcataataggaccaaataaattcgaatatgtgattaaggattcaccttttttcgaaagaagcaagtgttaaccacgttaagtcgtgaactactccaagttttggctacaaaatggctataacaattctataagggtcaaaccaaatcgaaacaaacaaacatcagggtcacatatacaaacagaatcgaagaagctactaattgaggctcatctctgccagagtctatgtaattccgacttatcagaatcacaaactggccaattagaaaagaaaagaaaaaaaaagaagtgaacaatcatcagatggaattgactcatcaattcttcccacacagaatgtttctgcacaatagagaagccaatctataatcattacacaaacaaacaaaactgtatgaagaagctaaaggttgcataaccaaattctagtattacataatttcttagttatatattaaaaagagtgaagattattgaacttacgagagacatccgctgcgaggcttctgcttcttcttcttctccttttgtttcactgctggtttaattactactttaatagcagcatcaaatacggctttcacattctgcaaaagccatgaaccaaagaaaagcatatagtttgcaagtaaagagtcacctaacactaatgactcctaagtttccaaacacacatgaacaagtgtacctgttgagtttttgagctacattcaatgtaataagtcgctccgatatgcttgcggagttcctctccctgtaacacatgaatgattaaatcatataaaacctagagaagagagagtctagagaatgtcacaacaatcttttcggtttctacaggttgaaaaagcacacctgtgatgtagttaccggggacagtccaggatgatcagacaagtaatgtctatcttcacgaagatctagataacggaacattgtaagaaacattacatatatgtgattctcaagcattacacaaggaaatatgttggctccactcttatagctatcttacccattttggtaccaacaagcacaatggggactcctggtgcaaagtgttggagttcagggatccactgaacaaaataaacgcttcaaaaacatcagaaattcacatttcattctttgttttcccagtaagaaatacaatgaatccaatttccacaaacctttttaaacacattctcatagctagctcggctgatcaatgagaaagccaacacaaaaacatctgctcctctgtaacttaaaggccttagtctgttatagtcttcttgccctgcaaacatgaaagggtactcataatcataaaactcttaacagtcactaatcttcaacactccctataaagttctctatctaagaatcccaaatcaaaagcaaacttgctagatgttagaaagattagaaccacataacattagtgaacttggttattctgagatattcaagagagggatacagaaatgttacttaccggcagtgtcccaaaggcctaagttcacagtgatgccttcaaccacaacattaacactaaagttgtcaaaaactgttggtatgtagtcctgatacaatccatcaagcaaatctttaacttcacgagaacaacaaatgcgcaatagagtaagaggaaacactggtgaatcaagaaagccactaactttacaatgtaagatttttcagaatctccaaaaaaggattatttttgcacaatccctaaaaaaggagctaactttgaaataccatgctaaaattctcggtgaaagagttgaaatttgacagacccagaagtatattcaactaaaagtgacgaaattggagatgcccgaaagaacaatttgatgaaaaatcagcgaaactgtgatttacttgatcaaattttaaacttacagtagggaatttgttgctagtgtagcagatgagcatacaagtttttccaacggcaccatctccaacagtcacacatttgatgaattttgaagcactcgaagccattctaactcaccaaaagcaaacaactttcaacgaagaaacgcccaaaaaccagagagattgtgagagagataatagagagataaatgaagtgattaacatgaggaagtgtggtaataaactatataaaccccatatgattaaaaaaactaaactctcttttttttcacttttctttcaatattttcaaagtttcaattttgtatttttgtctctttcgttttttggtttgaagactgaagagagggaaagaagaggggctcacatgatatatccatctaatccacatgacttttctaaatcgtttcatatttatcgcttttacaaatgtattagattttaacccgtggtataccgcgagacgattaattttttaaaggtaatatatattaaaacttgcaaattttatttttataaaatatttatattttacggtttataattgttattaagtaacgctatgccacgaatctataagacaattgttaaaaaactgaagttttaacccttattaaaacagcatattaataatattttataattttataaatattgattcaaatacatccaccatataaccgaattccaaaataaaactcgttctgtaatttctttacccgtcccgtgagtttttttttaagtcgtaatttttaaaatttaagaattatttattatatataaaagttttgcaaattgtatcattctctaatacatttatattttatagtttaattttatatatagtaacattatacatatcacataacatttttggttttatataatattttctaaattaggataatttgatatgtttaatattagtggtcttaaaaaataataaattaaagattttacccgtattgaaacggtggattaattatattttacttttttattaatgttgattcaaaaacccgtccttctaaatccgtcttgccaaaaagccatttattttattcatattaattttatttatgatatgactctgaattctaaacattttagctaataacataggagtgcaccatatttatttaataggggaatgtaccatatgacccgaatgcacttttatccaaatccaccaaaaaaatcttgcaaaaatactatagagataagaaacgatagtcggttttaataggtataagattagcaaatatattagttagcttaaattagttaaagaatacaaattaaaaaggtatattacactttattcgaatataatatcaaaacttatataacacagagatttgataaatttttaattgttgaatactttttttttgtacaaatttttatgtgattaagatttattgatttcgtatataaaatattaaattgttttacgaacttatttgtttataatttggtaacagaaagatatttgaatattcggtatattttgctttagtttagaaaatctttgatgacccgtctttagattcaacaagccctataattaagaaatgaatattgtcgttaaatgattttggtaaccttaatgatgtcattaaaagattttgtttttgattaaatttttctaatggtattgtcatgtaattaattacaaaaattaaggttacatttaaaatgtatttcccaaataatatagtaggattaaaaggatactaaaagctaatcacatgcttaagaagcattgattatagtacgttatttctttttctttatcggttgatccttcttattttgtttagcattaaaaactgttatattttgccatcattttttttgtaagattctggcattactcattaccaattaattgtatagattatttcaataaaacaaattttacctggttctagctaggagaaatgaacataacttggttaaacacatatgtagttatagaagagagaaagatatatatatatataggaattaggattaactctgaattggggacttttaagttttggaaaatagcaaccaaacttttccttctttttttctgtaacatctgctatcaaacttattcatcaatcttagtaaagtataattttgttatttcaaaacaaaagtatccaagctaaattgggttttcatatctgatttgtgggtttgataaaattggttacacactatcgtgctgccaaaaaaaacaatagacccaaaaggcccatgtctttggccttgtatggctgtatcatcagagacaaggcaaatgatccatcaaattgagataataaactagtgcatatatagtaatctacgtgatgatttgttaatagacaagacgagtttgttatttgttaattaatgatagatagcagattttaatggaatactctttatgaagatcacatgaaaataagctaataaccgaaattgtaatatctttcaatgaaaaaacaggtgcgaatgtgcgatcattcctaatcatcttatttgcatgatgttactttaatttatggtaagttgatcacacacatttcaatgcatttgtgatgaacttaataattaaccaaccgaaagcaagaagctatatatatatcgcttctcttgcctatttagatctccaagcctccactttcttacactttcaacttccattaaaagcaatcaaagcaaaaaaaaatgaagattcttgtcttgattttgttttcacttagcacccttcaaaatgtttgtggattcgattataacgaaacagaactagagagtgaggagagtttattaaagctatacaacaggtggacgagccaccatcacgttcctatgaagttcgaaacaaaagaaaatagattctaagttttattaggtcatttttcatgttatttcggaagacttagaatctattttcttttggcttgagtttcatagaaacgtgatggtggctcgcccacctgttatataactttaataaactctcctcactctctagttctgtttcgttataatcgaatccacatatattttggaggatgctgctaagtgaaaacagaatcaaggcaagaatcttcattttttttatccttacacagctatcaaatgagaatgcgacccttcaaaggcacaaggcgtgagggtaaccatcgatcaattcgcatttgtagatccattcaacgaggcagcccttctcaaggctgttgcaagccaacctgtaacagttagaattgatgctcatcatccagattttaaattttattcaggggtaatcgaaaaatgtatgcattaataaattcgcagagacaaacccccagagaatggttggcaaaaagcataaagctataaatgaaaattttcagtataaaacaaaaaaaagtttcagtaagacaaagcaaaaattaaacgagaaatacgttaaccaaaaaggcccaaaacggatttgatgctgtttctgacgtgaacgttagaagtgaacccagtggactgtatccaaatgttattttttccaattccaacactggaatctgacccgattcacagaaccatcgacccgactcgttttacagaaccggctcgtcgtcacacggtctctggtgacgaacaggccacgcgtgactacatacataatttggtttctcttttttttttgttcttcttgttcctctttggtttttgacattggttctggagaagatgagttcggtagaaccagacatggaagatctgttccaggagaagaagcgtgtcaggaatcctctcgttcctctcggtttgtgtcttcttcatttcctctttcttctgatctcatttcacgaaatctcttttggactttcagatgtttataggcttctctttaccaaattggtgattttagtttctgggtttttatctacccgatccctaaacacagttacttgttccgtttgaatcatgagattcagaaatgattgtgaaaatatgtaattgaaattcaatttgtggattttttttgtttgtttgttacaactctgtgtcggtatgtatgattttgtctttacagaatctcaattctcaagaatcatggtagatggcagagctatatagagagtaccttcagattgtagaaactccattcattataaatgtttgtggagttgaaaacacatttgaaaattagtgagaacaaattcgtttaggatatatcagtttctcgaattagtctttatgttctcttgctggttcttatctatggaggttgtttcattggcaaattgtatgagaatttgtaactttggacctcagcgagcaaatccatgattatatgtatctataaacattgacagagaaaaaactgtttcattgtgtcaatcactgacaaaatgcatggcttcccctgtaatgagattttgaactattgaggattgtttaagttttgttttgttgatgttctctgaatagactccaatattctcttggtcaatactgttagacatttcaaaaattgataatttctttcaatattgcaggtgcacttatgaccgcgggagtgctcacggctgggttgattagtttcagaagaggcaattctcagttgggtcaggttttgatgagagctagggtggtcgtccagggtgctactgtcgctttaatggttggaaccggttattactacggtgataatccgtggaagaagtgagctccaactacttgttcgttttcacataattgagatgacactcgggaaatctgcgggcaaaggtgtgtgtgctctcgctctgagtgtagaaatatgcggtcttgctaggatttagtaagggtacattacatgatttgaataatttgaagaacgaacaagtatcgttgtatcttgatcaattgattagattgatttaaggaaattctccgaaaaccatctttactctatctgtcaaaatctcattatctttctgccgacaatctctgtgttgtttatttacttacacttatgtttgagttttgacttcttgaaagatcctttgagaaacatgggacaatgcattatcacatagactctattatcaaaatatataatggcaaataagtgggagtgaagagactatgtattagaaggcaagctatgtttaatgatttcagaacatcttagtggaagacaatggtgggcctaatagtttcctaatcatattcttgtgtttttttccagcttattgtggttcttgaccttctacatgtgaaatcctaattacatttttggtctttttagtcaataatggttatggtttagctaataatcatgccaccaagacataaagatgggaccaatgagaagcttttggaatgatacacttttaaagcgtgtcttgatgtttgaaatctcatgactatattttacagtgactgatcactgagctatactcaaaactgctttttctcttcaaacaccaaaatgtgtaggttacttttgtctgaaatccatgaaactgaagctctttcacctaaatcttcatctgcagcaacactaactcttatgaaccagaaagatccatcttcaagctctatagtgtctgttttatgtttagttatctctggtcttgctcttatcatcgtcttcctcggtgtcctctacttgatcttcaaatttctccgcaagtcctcgactttatttcccattccccatttcaactacaacccagatctcttttctttctcctcgcctcagctccagcacctgttcttcctccatgactctggtctagaccagactgccatcgatgcacttccagtgttcctctatggtaatgtaaccattagtcttgaacagccattcgattgcgccgtatgtctcaatgagttctctgacacagacaagctcagactactccctgtttgtagccatgctttccatctacactgtatcgacacatggcttctttcgaactctacttgccctctctgcagaagatcactctcaacctcaaacgtctgctacaaccactcggagactcttgtcgcccccttgtctgggcatcagcaggtggatgacggcaaagcctcccttgctaaaagagttttctctgttcgtctcgggagattcaaaagcacgaacgaaagtcaaagtcaacgacatgatgtcaaagatgaaatcggggtaagaatgccaagaagatgttactcgatgggcacgcaacagtatctcgtatgcgatcaagattttgtggtggctctgtcttcgtctcctcgtgagggaaatatcggtcggtaataaatgctccattcacgagggtgattcggtataacaagactctggtagttggggtaggctctaatgttttgtagtgaaaagagagtatgtctatgtcaaagatctggttttggtcggagaagaagagagttctgtttattaaacaaaaataggtggttttttggttgcatcttagtcttccttgttacttactacagacatgaaatcgttagaacacaggaaaattatagaatcaaaatattagaccgtcgtgatacatttacaagacacgttgaaagaggagtaactttcaacgataaataataaatcaaaccaaacttaacttttaaacaaataataaacaaggaggaaacgcaactcatacgagagacttttcaaacgcctatcgtcgaactcgtccgaagagatatcatttcacggcgtcaacgctgataacagcgggagatttacctgaagcaacggggacagaagcgtagcgcatcgagaagcttctgactccaccgactccagcttcgtcgtcgtcgtctttgtcttcatcttcgaaactcaaagtgtaactcacaggatcgtatcggaatttgtcactatcgtcccagtcttgacctcggcgtggatcgcggttgaatctgcggatgaaagtcttccaccgtggcccagccacgatctccgaccattctcggatctttagaaacgctcgcacccaccaccgtggctcctggtggttgtttctgtgaattcgctgccaccaggaggatttaacggtggtggaacagcaagacgattcaccaagaagcggattcgcttgtccaacttccattacaaaagggtcgaaactgagtttgaagggttttggtgtaatagaagccaacacgaaactgtttttttagctgtaatcaaaccattggctgcaattttatattttaaacaatcatagaccaagtcacatataagtcataaaaattgtattgtcccctacacataatattcaaattacttttaaacatctcgatcatgaattttattacgaataacctaattaaaaaaaaaattgtatacctagatcacatctttttcattaagtttttgaccatcgagcaacataaatagtcaataaattgatttacgatcatcatcttttgttttcgtataatactctctgttgtttctttgtatgtgtctttaataaaattaattttagacgacaaaaacaaaatcagctaaactaatgtttaatatttgtcagtaattaacttttctatcaacgaaataatttttcatagacacaggctctctcctctccttaattgtctccaatatggtctcattcttctactcccacaaatctctcccttccataacttgaaacacacgcaacccccaaatgagcaacctccacctctacacctccgcacggtttcgcaatttcccgacaacattctccctccgtcaccaccacaacgaccccaacaaccaacgccgtcgatccatcttctccaagctccgtgacaaaactctcgaccctggcggtgacctaatcacgagatggaaccacattttcctcatcacatgcctcctcgctctcttcctcgatcctctctacttctatctccccattgtccaagccggaaccgcatgtatgtccatcgacgtccgtttcggcattttcgtcacatgcttccgaaacctagccgatctctccttcctcatccacattctcctcaaattcaaaaccgcttttgtatccaaatcctctagagtctttggtcgtggagagcttgttatggaccgccgtgaaatcgctatccgttacctcaaatctgagttcgtcatcgacctagccgccacccttcctcttcctcaggttcaattcagcttatttttattttcctagggctcatataggtaacaatggcagaatagtgttactgatgaaacatttcaaaaccaaccggtgacaaattcaaggccaagaattattgatattatgttctgttctttaaattgaaatctctctgtttttctcagataatgatttggtttgtgataccaaatgctggagaattcagatacgcagctcaccagaaccacacactttcattgatcgtccttatacaatatgtgcctcgcttcctcgtcatgcttcctctcaaccgtcgaatcattaaagccaccggagtcgcagccaaaacagcctggtccggtgcagcctacaatctcatcctttacttacttgtgagccacgtaagtaaccatttctctttcttatacatgacttaaaaatgtctctgtttcacaacttggtttcccttttaggttcttggatcggtttggtacgttttatcgatccagagacagcacgaatgctggagaagagagtgcattaaagagatgaacgcaacgcattcaccttcttgtagtctcttgtttctagactgtggatcgttgcatgatccaggtagacaagcttggatgcggatcactcgggttctgtcaaattgtgatgcacgcaatgacgatgaccaacattttcagtttggtatgttcggtgatgcgttcactaatgatgtcacttcctctcctttctttgataaatacttctactgcctttggtggggtctccgtaacctcaggttggttgatattcatctgtcttaaaacaaataaaaccgctgcttttggcgacttgttaactgatctttttttcttgatttggttttgtgtagttcctatggacagagtcttgcagcgagtacactgagcagtgagactatattcagttgtttcatttgtgtcgcgggtcttgttttcttctctcatctcattggaaatgttcaggtaaaattcaaatgaaaattagctctctccatagtttttaatggagtctaagtgatttctctgctttttgaagaactatctgcaatcgacgactgctaggttagacgaatggagagttcgaagaagagacacagaggaatggatgcgacataggcaattgccagatgagttacaagagcgtgtaaggcgattcgtccaatataaatggctaacgactcgtggagtcgacgaagaagccattctacgggctctaccattggatcttcgtcgccagatccaacgacatctctgtcttgccctcgttcgccgtgtaagccacaccagaataacaccacatttccattacgttccactcaagtaagaaaccctaattttacgttcttttaatttttcaggtgccgttctttgcgcagatggatgaccagctcttggatgcgatatgtgagcgtctagttccgtccttgaacacaaaagacacctatgttatacgcgaaggcgatcctgtaaacgagatgcttttcattattagaggtcagatggagagttcaactacagatggtggacggtcaggattctttaactctatcacacttagaccaggagatttctgcggtgaagagcttttaacctgggctttagtgccaaacattaatcataatctaccattgtccacgagaaccgtaaggactctctccgaagtagaagctttcgctctccgagcagaggacttgaaattcgtagctaaccaattcagacgtcttcacagcaagaaactccaacatgctttcaggtaatcctcgtatggtctcataagcaatataggtttcttgcttcacacgctataaggtttcttgatctttatgttttgactgtaaccagatactattcgcatcaatggagagcatggggaacttgttttatacaagctgcttggaggcgatacatgaagaggaaattagcaatggagttagctaggcaagaggaagaagacgattacttctatgacgatgatggagactatcaattcgaagaggacatgcctgaaagtaataataacaacggagacgaaaacagcagcaataatcaaaatttgagtgcaacaatattagcgtctaagttcgcagctaatactaagagaggtgttttagggaaccaaagaggatctacaagaattgatcctgatcatccaactttgaagatgcctaaaatgtttaaaccagaggatccaggattcttctgatagttgttgtgacaaatgcatttaggatttctgacactaacttgatttgctgtaaccaatagtcaggtatacaaagaaacattattacagattgaagtaattgtgacttgacgtcggtcgatattatgtcgatttctatccaacgcactcttggctcctacagcatttattggtacacaaagtgggctttgaaactcataaaacaccttgtgtttaagtctaattatgttttcacataatttaggtgaattaaaaaattaattaattataaattgaatttgggcaatgaccatattttggtcaaaaataatgagaatgacacttataaaagaaaaataaaggatatagtcatagactcattccactatttgattggacgaaaatgatttttgattacacacttcaacttgtatttttcttcgtctacatgattttgtgcaaaccaaaaaaaatatgtaatccctttcagtttattgcttgatatttttaatatataaactgattaaatctcgcaatcgtgtcaaaaaccatatatttgtcatttatgccataatttaattttaaagatgaatatgtgaatatagaatgaaatctgaaaataatattgtaaaaagcacatagaaaaaaaccacctttttctcaactttaatcattttcttgattagtaaccttttggagcagtagaattttctcattgtattcaaatggtacgaattaaatcttcttattaatagcagatgattttttttctttatttgtcgaaagatttcaagggacaaacatcacaatccgcaaagtaacctatatttacaagaaaagatgaaaaacataccaaatagatgacacaactaccgcttagaaaacgacttcacaccataactagcaacttttgcatttatatagatatttcctttattttcattataatttttccacattgccacaaaaaatgatatccacaattaattaattttaatttgtagttggatctaaatctaatatgaaagaaaaaagaaaaaacatattgagtctgaatcatatggatacacataccaaaaaatcagagatcacggcaagacaactttttgtcttatcttttagttttttatttgtcaacgttgtttgttgtcttactaatttattttaattattttttcccgaatctcatttttctaagagggaaaaagaaaaacatttcttttttctcttatgcaataaaaatcgcttcttttgtctttgatattaggaaacggacaaatcagtctagtcaaatagagccattcaaagtacggcaacacaaaccaagagagtgtaagttaagcgacatgtgttagagatatccggagatctcaaccgttggattctttctccttcaaatcaaattataaatcccatcaaacagagagagagagagaagaggaggagaattcgaagaataaaagataagaactttgacgttttgaagcttaaagcttgaaacttgtttcatccatggcggctcgtagagtgtcttctcttttatctcgatctttttcagcttcctctcccttactgtttcgttctcaaggtatctcacacacaaacaaacaaaccactgttcgatctctctgctgaatcagtgaattttccactgtatctccatgtttctactttatcactaaacttatgctgaattctacaaaattaacgttatgtccaatgaaatagactgaaagttagattctttgatttgtgggtctatgtcgaatctaggttgtgatgtgtaaagatgataattttcagggagaaattgttacaatggagggatcttaaggagatttggaacctcttctgctgctgctgaggaaatcataaacccatctgttcaagtttctcacacacagctcctcatcaatgggaactttgttgactctgcttctggtgattaaagttttcatttttatttgtctcccacgtagaggaattggtagaaaaaagcaaagttttttgagtattgatatttggatttggggatttaggtaagacgtttccgactcttgatccgaggacaggcgaagtcattgctcatgtagctgaaggcgatgctgaagatatcaatcgagctgtgaaagctgcaaggacggcctttgatgaaggaccttggcctaaaatgagtgcttatgtatgtatattactactcttcttgagtcttcagttttatgaactttaatgtgatatggatggtcacatatggttattgttttgggtttcaggaaaggtcaagagttttgttgaggtttgcagatttggttgagaaacacagcgaagagctcgcgtctctagagacatgggacaatggcaagccttaccaacaatccttgaccgcagagattcccatgtttgcaagattgttccgttactatgctggtatcataaaacgaacttaaatcttgagaattctggtgcttttggtgttactttctgtgaatgaacattcttggttttgctttgatgtgtaggatgggcggataagattcatggactaacaattccagctgatggaaactatcaagttcacacattacatgaaccgataggtgtagctggacagatcataccgtggaattttccacttttgatgtttgcttggaaagttggtcctgctcttgcttgtggtaacaccattgtcctcaaaaccgctgagcaaacacctctcacggctttctatgctggaaagcttttccttgaagtaagatacatccgatagattctcctattgtcttctctaggaaaagaaaaactttgatgagtaacaatgtttcttgtgaaatttatgataggcgggtcttcctcctggtgttctgaatattgtttcgggattcggtgcaacagcaggtgctgccctcgcgagtcatatggatgtagacaaggtagatatatttatttacttgctgctaacttctttaagaaactaaattatcttacattcttctttttgcttcagcttgcttttacaggatcgactgatacggggaaagttatacttggattggctgctaacagcaatcttaagcccgtaactctggaacttggagggaaatcaccgttcatcgtattcgaagatgctgatattgataaagctgtagagcttgcacactttgccctcttcttcaaccaggttttgtcaatagtagaatatattcaccttgagctaagctgactcattttcctagctagttcttgagataatgttgagtaatgtttttgtaggggcaatgttgctgcgcggggtctcggacatttgttcatgagaaagtgtatgatgagtttgttgagaaatcaaaggcacgcgcattgaaacgtgttgttggtgatcctttcaggaaaggcattgaacagggtcctcaggtaacacatacacattccttccttccattaagaagagtttagcttttctactttgttgattggttttgtgatttccgttttcacaaaaactttgtatagatcgatttgaagcaatttgagaaagtgatgaagtacataaagtcaggtatcgaaagcaatgctactcttgaatgtggtggtgatcagattggagacaaaggttacttcatccaacctactgtcttctctaatgttaaggtaaaaagaaaactcttctaagacatctttaatgttcttctattaccgattctccatggcattaatctcgaacgcttggttcaactacaggatgacatgcttatcgctcaagacgagattttcggtccagtccaatcgatcttgaagttcaggtatatagagctaccaataaaactgatccagtagacaaataagtcacaatttggtaaaaatggctgagttgttagagatttggtaaactgaaactaatttcgaaccaaccaaacctaaactttttttaaagataaatgtattcaattaaaaaacagaaaccatgatagatttggtttaacactggttatgatgttgggttcagtgatgtggatgaggtgataaagagggcgaacgagacgaagtacgggctagcggcaggggttttcacgaagaatctggacacggcaaacagggtttcaagggctttgaaagctggtaccgtatgggttaactgcttcgacgtatttgatgcagccataccatttggtggttacaagatgagtgggaatgggagagagaaaggcatatacagtctcaataattacttgcagatcaaggcagtcgtcactgctctaaataagcctgcctggatctgatctctggagtgtggtttcagcatcataaatgctcaaacaaaagaaatagactctataaagttacaatagtaataattaaggtcatggtttgtaatttgagtaacggattgtgatacttctaataaatttttcattgttgtttattcatcacatagctgttgttacactgagacttgtgtgttcattttggttttgcaagatttctattgaaactgaaaacaaacatgaaactgaaaaatgcaacgaaaattagaaaatatatatcttaaagtaattaagagttaaaactcaataattaattaaaaacttttcagttgtttaaatatatactctgtttctatataaatgtagtttaagagtttttatttttttcaaaataagtgttgttttcaactttctatacaaataataaatatttaatattttaatcaattatatttaattaataatatttttatataaaagaggtagattaaatgagactttcatgatttttttaatatgtgtataaaaaccttaaactaatatgaaacaaaggaagtagttgttaattattaaattcatatacagtatattcttagaataaaatatcaacataaaattgatcacaagtatgaaaaaaatactttttattaaaaggtttatcagataaatatatttttccttttgtaacagacaaaaaattatactaattttgaatatttattatatttcttaataaatttcgatacaagttttctatttaaataatatttttaacatgactgaaaaatgttgaacgcatcagaagtgaccaaatcgtgaattttaacttgttcgtcagccagaagtttccgtttctctttagtttcttcatcgcgatttttgctacttggctccaaaatccctcctttttcttctttctcacttgcatcattagctcacgatttcgagtatcgattcaaccattttgatcttcaatctatcttagggtttctccttaattcttctctcggattttagctcttctcgactattactcacctctctcatggcgatgagaggtgtcgatttcaagtggtgagctctctctctctctctcttcaatcttcattcacttgggtcgatctaaaggggacggattgcgaatttgattatcgattcccattttttttgagttttggggttttctgatttttgtaaattgtgcaggtacgatgggttcttcttgtcgatgcttgcgactagtgtgtatccttatgctacttggattctgtcaaatttgttttttttctttttcggttttgttcttgtttggatcgagctgagaattctcattcttaaagctaattctccaccattcgatataagatttgatgatcgagatacagttggttaatcagaagaaaaaagtttatttctttgaagatccgattgattagttttggttcttgtgggataggtgaactggattttgttttattagggtttaaggtgatctagataacctctccatttcgtttccttaatggttattttgcgtcgtagaatcattgtagctgtcaactggaacagatatcgagcttgtgaatacccgttgcatatatggattgtggtagctgcctcagttctattctttttgttgctctttcttattatcagtttcagtttcatttgtgtttgtctcctatgacttcaggtcgattacaccaccgtctttatcttccgtgtcttcatgtttgttgacaatggtcttgcttctggacttggcttgtaagttccatctaaatctccctagttctagagttacaatgagttttaaaggtttttactttttggaatcttccccggtttcccagagttatctgaacaagttttttttttgcgtaaaattgtctttgctatccttattccttagataggcgtttaattcattgagaagtattagattatgataaatataagctatttgggaagcatagaatttctttgtagctccagtcgaataggctcttctagttgcaagctttatcttagaagtagctagttgcaacgtttctctatctctctaggtagcaaattttatgaatatatggtttcttatgtcacattgatttctggtatgaacatctgttagggattttggaagtcaacagcggaacgccatgttttgtgggagagtggttgtcctgtctgtcctatctctgctgctgtatccatttctgtgggcttggactgtaattggtacacaatggtttacaaagtcgaaaacttgtgtaagtagtttttccgatcatggcatatgattattcttgttggaaatctgttgctgagttagtatgtattatcttgccatagttacctgaagaaggccagaaatggggctttcttatttggttgatgtttagctactgtggcctcctctgcattgctttcatctgtgtcggaaaggtagatttatatcaagctgtttttttttttggtttgaagagggcaccccacttaatggactttacttgatagtggttgacacgaagacaggtacacttattacgtgctcagcagggaattccgatttcagagttcggggtaagttccaggatccgattattcaacttcaagtcctttacacgatgagatagtttcggagtttgtcattatgatttttgtctctaactgcttagttgcaattagtctctgacacttctgagtaatttttcaatgtctgtgtcttgtccccagattttagttgacatgattagggtacctgactgggcattcgaagccgcaggccaagagatgagaggcataagtcaagatgctgctacatatcatcctggactttacttgactccagcccaggcaagtctggtcatttattctcagcaagctaagcagcgagtaacttttcttaaataaatatgtgcctagaagcctgtggtttcaatctctcccatccagggaaacaaattcgcagcatttatgtttccagtacctgttgcacagagtctgtagagaggcagaaatcttctttgttaatgatgtcgacgaagagatcattggcaggatgtgattatgtccaaatttacatttatcatatctctgtctcatgattccaaaacatctaatatttgatgcttaacgctttgataaacagacagaagctgttgaggcactcattcaagaacttcctaagttcaggttaaaagctgtgccagatgactgcggtgaatgcttaatctgcttagaggagttccatatcggccatgaggtactaaacatcacttttataaatgatctccattgctagggatccaacttcttatccatgctgtgcttgtgtgcttttctcgtcccaatgctgtcctttgattgagcggattttgtctgaatcttacaggttagaggtttaccttgcgcccataatttccatgtggagtgcatagaccagtggctgcgtttaaacgtgaaatgtccccgttgccggtgctcggttttcccagacctcgatctcagtgcattatccaacctccagagctcaggaaccgaacaacattcacaagtaaacacagaaacatcagaagctcggtacataagaagccaacctcagagcgagagctacttcttgagagttcaatccttaattcacccagtccacacagataccgctctggagactgcagagaacggcggggttcctcctgtcttgaccgatctatctccatctcggagatgagagaaagaaatgagcctatggaaatttttactcagtactaactctcgactgatttgccaacccactctcttaaaaagttttcagcttaaacagtcttggaatgtaaataaattggggtttaaagaagagaaaaaccaatcttgggtttacatttggtaagagtggagtattattgatcatgttcaaactctttaatgatacacattgttcaggttacttagttatggttaaccagttttctattttatatacccaaaccatacgaataaaatgtataaatcacatttcaaactaaaatagtcccaaaattggtatacgagtttgtttcgccaatgaatctctaatttgaacatcacgagtttgttcactggtacctaaacaagattttccatcagtaacatataacctttttttttttttaattgtttcttagaactaagaaaatataatctacattctacaatgtatgataatacattgatatacgcattattctttcagtaatttaattgagccaaacttagagaccaaaaacggaaaagaaaagtatattacaagtttcgtagaaacgtaaatatatatttgtatatatattcatttatatacgggtacgtacgaaaaacgtcgaccaactacagtaaacgtctaaacatgaataaaaaatcttcacagaatctcctccaccaatatatgttttgtatacataaatataaacgcgtatccctttttcattcgtcaaaattttaagttttccttcaagtaacccacgatcgcttgctgccaaaaaattacaaacacctctaagcaaatggtttgaaagcagaaaaaggtaagcacatactttgaaagcgtaaggtaacttacgaggaagcagagaaggatacaagcggctgcaccggggaataatgcgtaccaaaagttcagtttatgcaactttgctccgtctataaacagtagtggtaaactcgccgctgttgtgttttccaaaatcatatatatacaaacatgaaacatcagtaaactatttttggtaagaaaaaaaaactcaacattgatatatacaagaaatccgaagttttggattttttttctgttctagacataaaaccaggactttcaaacaaaaactttttttttgctaaattcgtgaatatgtagaaaatctgattttattccacgtaaaggtgtagtggcctaaaatgcatgatagtaagaatctatgatttgatccattgcatagaacaaatagaaaaatttacccctactcgagacctactactatcctaatcactatttaattgatttttatttatgtttcattccaaaattctatattaagattaggatatccgctgtgcgctaattttttaatttatttttgctaggattatattagaaaattattctcaatattttagtgatgaaatttctatatttccaaaaaatagaattgaattaccaggcggatggttggcacgagtgatgaccatgaacgcgatggaagcggcgagagcggtactgcgggctagccagcttggcccaaaggcggagaacgccaacactccaatggctgcacaacctatttgagccgtgaacatattgtatttctgaaataaatacacatgcacccatcaacacatgttattaacaattaatagctagcattttattgcttcatttttcgcaattattcatttcaatcgcctgtaaaaaaagcatttaggaaattacccgagcagcaggagcagaaggagtggtgaagagaatggcagagacagcaccaagtggtgcaaccgacattgagatccctttagggtttagcatttgatctattcttcccattatcgccatcgccgcaaaggctccttttctcattcccaatattgacaataattcggttagagattcatggttaataaaccgagtgattcaattattttgcatgatgttttcgaataaatgaaatgataacacgacttctactatagatagatgtttcctttacaattgacaaatttctaaccaaatattagataataaatttatatatatgtgcctccattcaaagatatatatatgatcgacgatgactttttcgaatgtgtatataaatattatgaagctcacaatgaatttaacaaataaatattagtaatcgtgattcttactaaattcaagaattggtcaacctcgaacagttagattcatgtataccctaagatcaatagctatctggtcgttagaagagacacaatctctctgtctctctctctctcttccctagtgttcggacaaagaaaactgctgtctaatgaagtttataatatgttttctcattttatatgttatcattttcttatctcttctccttaatgttttaattttttcgaatctcatataggattcgtagtttgcatgatatgaaacgagtttcataatcattcttaaaatccaatcaagaatttttttttatatcaaagtctaagactatttgtaacaaaatgagcatataataatatctccggtgcaaagattagtgattcagtttaactactaatttacctgctgcaggccagatgacgtcactcagcgacggagccaccgtggtcttttccggcttccaagactcccaagaaaccgctggaaaatcatcagaggaagccaccggcatagacacgccggcgcttttacttactcgccgacgattgctcgacgaccttaggcttctcatatgccttacagattcatcaatacataaaccataagaagagactcctaagaagtgatgccttttgaaaccaacggttaccattgatggcggaataataagattccggctatgaagctgtaagtggccggaaggtagaggcttcaccggaagcgaagccatggttgttgagagagtgttttgatgtaaatatctcaacaaagactcaaaaatatgttcccttcttttcttttctaattagggatgacagagagagagaaaagagagaaagaagtggacaatgatataacaaacactgagatttgtgttaatacatatattatatggtgtgatgtaacaccagttaaaatgaatgatatacaaaggtggatattttctttttgacactactaagggcatgctaccgtttatggcatggaaccagaatgattttttcttgtgtaatagttgttgatattgtcttttcttttttaaaaaatgtgaagagtttttgatataattgtcaccaaatttcaccactctaaaatgccgactttaattatttaaaattattattcagctgatattatttaatctgattaagaacaaggacctacatgtattatagtaataattaacagaggaatgactttacataaaaaatgatagatgcaagtggatatgccaaaaagaaagaaaagcagtggctttataagaggtgaatggggttcaaaggtgagtctgtttgatcagtcgaaaggtcattggattacaagtgtggcttcatataatacttagtttatttctccttattgttattttaatttggtttactagagatttgtatttgtatttctgttatgtatatggaagttgtcgccttcacatgcatacacatgttccatgtttctaatcgtgaacaccaatcataaattaaaataacatttatgtatattaattaagttataatataacccaaatttttttagtgtcttcttctctcaaagaggaacgaatcttcagttaccggttaaaaagatctatcaattgattcttactcgttatataacttcttataaagtaattcactgaccgaaataagaacaaaatttatgacaagattagtacttattttgagaaagcagacaaggccaagactttgggttttgtactttgtaccttcaaacccataccaatcacatagaaaaacatataaagcgaagcaaaactaagatactgatttctaaacccaaagactctgcttaaaagcccatttatactgtcgaccattttattgtttaccattggatctgactggtttacttaaacgcatagaagaaaaaattggaggaagcaaaaacttgagtgaagtcagcaaataatctatgcaaatttcatggtttcctcggactaatccaaacaatgttttctttgcagaaaactctttttttaaagcatcatggttcatggatatcttttttcagattgcatcaatacatatcaatttttttatctatacgtaagacaaaaagacttagaccaagttcatcgatagtttttagtgggtttcttagttggtctctaagagaataatgggcctaaattaaataaaaattcaacaagaattttaggaacgttcctaaaattaggtttttggaaactcattagaaacgcatacgtggctaattgtgatagattgtttgttttaaacaaaatgaattttttctcagctttctcttttgtttggtttctccgtcgacgataccaaaggcgattcagcttgatttgtttgatccaacgttttgatcatgaaatcgggagagcaaccacatatactcaatatacaaccgccggaatgatgatcgacgatgagattgttcaccaagtcaacttcaaaccggatcttgtggttatattgttcaattctttgtaacaccaggagcttctatcatgtggctatctcatgagctcttaccaagaggtagaatccagctctgtctcaagtatatctcttttaatgcacttcgagttttctgaaatttttgctcaaaaaacatggttgtggcaaaacagagcctttatctgacatatagatggcgcttaagaacaggctaataaataatatgttgtcttaagttttagtttctatctgaatgttgcatgtttggtcagaatgtacttcaccttctaatatttcggctttaagttttagcttctagtatttcggcttctagtatatgtgtaataactttgagactgaatgtttggtctgaatgtttgtgtttggtctgaatgttttcagtttatggattaatgagatgagtatttgtgtttggtgaatgtttgtctcaatgttttcagtttatggattaatgagatgagtatttgtgtttggtctgaatgtttgtagtttacggttttgtttcatctgttaatgtcatgatttgcttcattttgcaggactgggaagaatagaaatggtgccaacatcaattgtggaagagaccaaatgctttaaatgtatgtattgttgtgagttttatcgattaatgagtttggtctgaacttaaccatatccattaatgactgaatgtgtgtgtttggtctgaacttaaccaaattgattaatagatgaatgtgtgtgtttggtctgaactcaaccatatcgactaatagatgaatgtgagtgtttggtctgaacttaaccattttggttacaatcgagtaatgagttttatttcatgagtttcatctattagcttatgtacttgaccattttgttttctaaatttttttttttttttaaaaaccctcttgaagatttcaccattgaaccataaaaattacaaaaaactctaaactacaaaacaatcaaaattaactaataaacaatttgaagaaactcatattagaaaccaaccaatgtggatgctcttacgtgaacatgtacgtgaaactcggtaacaaagcccataccggttgggctttaatatactttaaaaaacttgggtggtgttacatttagttttaaaaaatatacgcactaacaagtgtgtcgatggttttgggccaaaatccgtaatttctttaaacctgaaatcacatcatgtaatattagtttcgttacaagtgtcactcgaaccgacgacctctaatcttcgcctaaaatctttaccaattgagctaataacacttggtgaacgaaaaaaaattaccattcaacatttttatctatttaattttgggcctttgaaaatgcttacatgtgaaagttttagaatatatttttttaaaatattcctatcatgatttctacaaacaccaacagatcataccattatagatagttgatcggtatttatttttgaatttaatattaaattatatatttgttttttttaatataatttaatattaaattaaaaagataccgatcaactatctataattgtatttcttatttgtggaaatcatgacaggaatattttaaaaaaattctgtcctaaaaattatatataattaatctattggaaatagttgatcggtattgccactttgacaatataaaattatatataattaatctaatgaaaatagtactgtttcaaattctaagttcctgagtatatataatttgtagacaagcctacatcgaacaatcttttcttttttacatcgagcaagttgatattgagaaattgtggtgattcattgtgggacgtccccattaggttgaaattgccgtttgataaaatatttaaacttgtatggtctaatgttgtttagactgtagtattttttattttataacggttaataattttatttgggtcaatactcaataattatcactttgcggaaaatggcggcaccataattttgtttccaggacattggtcctaaactacattctagaacaaattaaattaaacttcttaaaagtctcttgtccaagtatcaaaggaaaacatctacatcattaaatttgttttatttattctaaagctcatatgcaaaattataagttgaaaaataagaaaatgtgaaatatatacatagtaattatagtttttgaagactgtgaatagacaagtaaaatatccggcgagcaatcaatttaaaacccaaccaagttcgaaaaaaaactacgcagaagaaaatcctcctaatatcgtatcagtattttccattggtgtcaactaataaataacagagctgcgaccaacctttctcagcttatcaatatcttaaaatacataaaaataatccataaaaatacatgtaactatcgtgttaaaaaataaaaataaaacacgcaaataacaaaaaaaaaaaaaaaagagtgctcgaaccgtccactaattaatctagtcgggtgtgaacgatgaaaaatatggctcaaccacctcatccgcccaaaattataccatttgcagcactaaaaacttataaactttagcacatatatagtgactgagacttaccaatcagattatatccacttatttacttaggtcttcgtcgacatatattactctttgaatttgaagacgcttaaaaattccgatgtataacacattttgaacatgtttcgcctgacgcagtaaagaattaaatatcgtgtttgacatagtatacaatttaaactagtactagtgcctgcctgcgtgttgatctcttacaacacatttttgtaatgcgaaattattgatttcttgaccaatgtagtctataatgcgtaccttttgaagaaacttaaaataaaataatgataaaagcttttaagctttacgcagtaatattgattagaaacggatttgtaggtattatgtgctttttgtatgtatttcaatgacataactataccgataataattgttacttttcgcgaaaattaaaacgtttattttaaatggaattgtgtggtaaagatgtgggtgttgtatatgattgaaacaccataatttatgccgaaaacaatgtatcgcaaaaaaaaagaaataaaaaaaaagtcgtaaaacagaatgggacaaacaatccctgaacatattcatgtaaaatcttttttggacaaattcaccaatatgggagagcggtgtatgtaaatatatcttgcactatatatattaatattagtgtctttttttctcatgaaaaaaaattctcggaatgaatattatatacaaattttatggactatataatacagttatatttgcaacaaacaaatatttaactttgcaacaaataaaaacgtgagaattaagaacgtaattgtacgcggagagtgcatgtagcacttgccggcccaataatgaaaaaggcaacttgttttttgtttgctacacgacctcgtaaagtaaggttgagctatatttttattcatttatacatacaaaagcgatattgaaatcgaatggctcatatttatgatgtgaacatggaaagtcaattatatgtaaactataagtcaagtgttggaccaaatttagtgttgtagtccaattcaacaatgaaaattaaaccgccaaaaaaacacaaacatccaatataacgaatagacacgtagttaagactttaaatatcttaagagattagacaaaaaccatacagttccattccattgagattttcttcattcagaatttgacaccaagtttataaatgtttaaaatgttaatatataaagtaaatttctcttcatcccactgatttcttcaggcttgccggtccaactcataaaatataaaaataggcatataaaaaaaaacaaaaaaaaacgtggcctacgcttttaaatgattgacaaggattggaatatcgtttagtttttgggttcggttcagttttcaattttggttagtgcatccactaaccatctagtgcatccactaaccatcgtccactatccacagtccacactatccaatgattgaccgcgtgaattagactaaaaggttcaaacccgtgacgtggataattagcatgagaaggttgacttgtgtagatagttgtgttgctttctacaacttgatcaaatcactaatttccaaataaaccgcgtcaaaccccaaaaagtaggaagtatatggtaatatggacatacatcatcatcatcatcatcatcatcatcatcataaccacctcttctattttcatatatgtttttttttcttgtttgcttgtattgattagtttcttcgtataatgacaacccaactgaactgaattctttctcgatttagtttttgtttttcttttttcatgcatatattacaccgaaacgtacattctttagcaaacgtaattataaaaggatgccaaaatctaaccagtccaaattattacgagttcatatttgagttatttaaccgaaccggaccatactatttagtcatcacctcctaaaccattgttcacttttcacatatgatacggacttagttggtaggtatatggattatggagtactattttattacaataactctctcataattttcacaataaaaaacacgtgtgtacactgtatacatacgtacaccataaaacatgtgtttttgtggtccacgtatatccaacacgtacatatattagtataacagtgttgttttcaaagattagaaaaatatcattatatattattgtataaacctattgaaaagtctgctaaattataactttttgcaatgcttcccatcgtacaccctttttttctctcttacaaataaatttcttgttcaggccagtttgttggaattctaaatagaattgggcattgctttttatttatttaaatatgtagactccacttataaggaaaaataactggtatttatgtagttgaatttaaatgagaaatgaactggaagcatgcaaaaataaaaatagaatccctaatccagaactatctttgtataatttttaagaacatcagtttcttggtctgaagtccatattaattttcttacatgcatgtgcagccaggttctttttggtctgcaatgccatgaagtcttccttgaattgttattttttttttagtttaaagtaatgtatatttgtgtgcattaaaaaaagaagaagcaaatgtttagtgtgaacactgtactacaaaataatttggagttgggatctttcaagtcaaaacctaattgaaaaggaagaaaacactggttatatctatgactttattttgggtcggcttaataacggagtttaggactttataatgtatacgattcatcttgcacaacaatctacacgtatgaaaactataattttaaatactaagtattcatctagatattctgcttatcaggaagatttgtttatcttttttttttttgtttatcttgaactcaaataaagacttaagaggatatgagaatcaatttagtgaaacaaatgttgtgtagataagatcctgggtccacagctttgtcaacaacaatgacttgtcatcgtctatgcctagcaagtattataatagattatagacaattatgagcgaataaaaatcactcagtgaaacatactattgaataatttagaggaatctttcgagaattcgaaagaggacacaacatgtttagctggacgatcttctaaggtttcacctatcggatcatatattacgaaaaagtgagagtaattattaattatgagctccaacaaacaagagcaactcaaatcaaaacttctggactagacgcagtaattaattagaaagaaaaagacacgacaattaaagagaaagttattctagaaattattggaacaggaaagcttcctctatatatttgcgatggaaacagaaaaaaacaatgaaacaaaaacatagccaaatgtttttaccacatgattttaccaaagcttattagatcttggttcttagactggcgagaaactgagagagatcggtggaggaaaaagggatgaaatatatagaagttggattttgcttcaattagggttttgatttgatgatttttttttactgaaacagaaactgaacggtgtttctaactgtgaattaggatggtgttaagatggcaaatattatatgtaaaaactctagcgtaaatatccaatgagatagctagttagatattgttttggcaaatgctaggtgtttttttggtatcatttcccctaagcatgtgtgtgtttaggtttttgattaaaactagcaaattctgtggactgcaatactcatcatatatgccaaacttcgaaatcacatcaataataacctcaataaatgtgaagtaactaaagtggaccctttgcctcttgtctttacatatgtaatcatccatttatgaacggaatcttatgaaatttatgaaccgataagtaattaattatttattttaatttatagtcttttttctaccccattggtaattttggaaaccaaatatccaaagcaacctctatcgctttacccccacccccatgcaggtatacgtacaaatgtgcaatttggtcggtcaactgggtcttagtcagtagccaaatgtctccaacattaaattgtaagagaagatggcaatatgcattcatattgtaacaaacgtatatgtcctctagacgggcgtgatctacctttaagattagttcaaaagcataaagtcgactgatagcacaaaatgatgtcttgccaaatgtgtatttcgggtagttcgatgtttttgggatcggcaaaagttatttgagaagacattcatatatatatatatttttgatttacgggagtagggtaaacatagaacaatacactttatagatatttatatatacaagagaaatgtgtttttaattaggattagctgggaaaaagagaggctggctctagatcttttatacagacacctaccgacttataattattatcactgcacatgcatgtggatcatatatattaaaagtaaattacatgcataacttacattaaaactaattattcattattcttgtttagtttttgatacttataaaattttaaattctttatccataaaactagaatttttttagaaatataccatttttactatgtgtatatatatatatatatatatatatattttaaaattgaccatatgtgttgtccattttcaattatacatatttcaaaaataatatatttaatgtctgtgacggcttatagtggttgaataatcattcatatttataaaatcttataattcatttagaaaatcttgtatttaaattttttttttataaaaaatcttatatatcgttatacataattgaaaatatacaatatatgcggttatttaaaaaacatattacttggatatttttgaaattcccccataaaagaagggattttttttgaaatagctacaaagaacataaattagaaagtatgttgactttattcgtaaattataaatgctagtagattttagagagaaaaaaaaaacgaaacctagtttttcttttacgcaaccgaaacctaaaattattaaattgataggtttgacatatataatataataattcgatcgaaaaatttgactacagaaatctgaaatcataaacttggtgtaatgtaaacatacatatctcattaaacaaaaaactaatatataaaataattgacttttgaaacaatatattgacttactagtgtaaaaatgggcctacctaaatccagctaactcagcccacacattaaaaagaaacgttaaagggaaagtaataaatgaaaatgagtcactcagagacagatgtctctatctttcacagccaaattcacaccattctttattttcatttttccccctttgcccagattccgacaaaatccactcgtttgattccaccactatatataattgagcggagaagcttgacatgaagagcagagtcattcttaaccatagagacagaagagataagaatcataacaacaacaacaccaatcattacacacaggttgatactatggagagaaagcctcttgaggttgagccatctactacgacgactaacaccgatgtggtcgattctttcgaggaagagcagagaaaaatcgtttatagaggatggaaagtcatgccttttatcattggtaacgctcctttttacttgtttgtgtctaattcagacatcatttttttcttttggggtgctttgtcggattttagggaagtgtaacattttgtccgtgatgtttttaaatttcgtttcttttctcttctctttgacttgactctgtcaaaaatctcgaatttggagttctttctctgagatttcgaagtgaaattggttttaaaactgagatttcgttgaaacaatgaaacccagataatcttacagatctgtctaatggaaattatattttttacaattgttttcattttattttcaaagagacttttgaaatctttaacacaaaaaacagagactttaaatcatgcagttaagtttctgaaaaaagtagataagatttttgtgaatttctggataagacaaaattagtttatgggagttacaaaacagttataaagtttcatgtgaaccaaagtcagaacattggaagtccaaactttgatttgtgtgtttccttgtacattaaatgtaaaaaaaaaactgtaactgtattcttaatttcttatcattaatttgctattgtaggtaatgagacatttgagaagcttgggatcatagggacattatcaaaccttcttgtgtacctaacttctgtattcaaccttaagagctacacagctgcaactatcatcaatgcctttagtggtacaatcaatttcgggacttttattgctgcctttctttgcgacacttactttggtcgctacaagactctcagtgtcgctgtcatcgcttgttttctggtactacttttatatataatctttcatgactccggtttcgttttcgccaatgttttctaaaccatttttcatctctgtagggatcgtttgtgatactacttactgctgcaattccgtcgttgcaccccgttgcttgcggaaacaaaatctcgtgcgaagggccaagtgtgggacagatactgtttctgctcatgggtttaggctttcttgtggtaggcgctggtggtatcagaccgtgtaatttagcgtttggtgctgatcagttcaaccccaaatccgaatcaggaaagaaagggatcaacagtttcttcaactggtatttcttcactttcacgttcgcgcagatcatctcgctcacagcagttgtgtatatccagtcaaatgtgagttggacaatcggtttgatcattccggtggctcttatgttcttggcgtgtgtgattttctttgctggcgatagattgtatgtaaaagtgaaagcctcgggtagtccattggctggtattgctcgtgttatagcagccgcgatcaagaaacgaggtttgaagccggttaagcagccttgggtcaatctttacaaccatatcccgtctaactatgcaaatactactctaaaatacaccgaccagttcaggtaaattgatatctacttattcttggttctcttgctttatgtttctggcttttgttttgctgaaaaatgtttgtttattatgttgccagatttctagacaaagcagcaattatgacccccgaggagaagttgaactccgatggaacggcttccgatccatggaaactatgcacgttgcagcaagtggaagaagtgaaatgcattgtaagagtgattccaatctggtttgcatccacgatatactaccttgcaataactatacaaatgacttatccggtcttccaagcgctccagagcgaccgacgattaggttctggtggcttcaggattcctgcggccacctatgtagtgttcttgatgactggcatgacagttttcatcatattctacgaccgtgtacttgtcccgtcgctcagaagagtgaccgggttagaaaccggtatatcactcttacaaagaatcggagctgggtttacatttgcgataatgagtttattagtttccgggtttatagaggaaaggagaagaaactttgcattgaccaaaccgacactcgggatggcgcctcggacaggagaaatctcatcaatgtcagcgttgtggctgattccgcagcttacacttgcaggcatagcagaagcttttgctgccattggacaaatggagttttactacaagcagtttcctgaaaacatgaagagcttcgcgggttctatcttttatgtcggtgcaggggtttcgagctacctcgctagcttcttgatatcaactgttcatcgaacaaccgcgcattcaccttcagggaattggttagctgaggatctgaacaaagcgaaattggattacttctacttcatgctcacaggactcatggttgttaacatggcttacttcttgttgatggctagatggtatagatacaaaggaggtaatgatgaagacatcactgagattgagaccaatgaagaagaaaccaagcaacagcagctacaagacaagaactctgtctgatctggaaacttatatatttttggtattctacttcaatctccgtagtttttcttcacccgaaatcaaccttgttgtacttttatagattaattgaagaagaaaatcacttcatctttgtagacatgtattgtaaaataagttttttgttgctaatttcaacctccgtacgaagtttctgtttcttctttcatcaccacaacagaacagaacataacaaaccgctaaaagaaggctacgaggattcgatatttatatgcaatatgtatgtattaactacagacacaaccttcatgacccaactgaaatcagcttgcactcactttctcagacagtgtaagcttgttgaatggtttctatgtcgagtcctttgagtctcaccactgattcaacatggcccttgagcgtgtgaagttcacgcaacctataaagaagagagcagtagacagagagaagacgatgaaaaaatgttcttttgttatgttcaaaaagctggagaagatttggctttgagttactttacctagcaatttcagctctcctcttggcttcttcagccatttggttaagttcactgacatgggttcgatctgtgaacatcttagtatctggtgcttgtagaccatggagcgttctttgtgcgtgagcccattgcagctctctttgttctttcccaaaatctttttgccttgtgaacgcaacctatgaaaatgcaagaaacccgataagaaactttaatgtataaagtggcacaaaagctatttgtgttcctaataacataccctttgttcgataacaagatcccaggctctgccactaagagcgtagcggatgaagaatttgatgaaatcaagggggatgtagaatatgatgttatagagccaaatgaccccggcccatccccaacctattccttctatcgcagcaaagctccaatttgcatagactgcaattagagtagccacctgttttggaagcaaaacaaaaattcatataattagacccaaagctcataacttttgaggttctcattgtgtactgatcacacagttaacaaacttccggaattaccaactgagcgaggataaaggcaatcataagaaatatcccgggacgttccacaaaagaccagcttcgcgatcgggtcacaaagataagtgcctgactgataatactgacttgcaggtatatggctgaggcaagctttcggaaatcatcatgagcagttttctcaagtgtcgcaactccaaaagttctctgaagtttcaagtaagaaaagctgagattagctgttagtgaaagaattaacaaagcaaataaaaccaacgagataaacacaagtgacggagaggagagaaaatgtaccgggaagaaatcggttttgtatgaaacccagaaaaatataacggtcatcatggccatgtaactgccaaagacaacaccggtagcaaaaatctcagaaagcttccagctatctggaagaggggaaggtttcaccctgtcctttgatattgtcatgatcgtacctaaacgtcaattccacaagagttcattggtatatcagagtctagaggaactaatagaaaactctgaaagtctaattatgatcgagaaaaagaggaaataagaaatgaaccatcattaagaatggcaatgataaggaccatgaaaggtgggaagtcaaactgccatatgagagccagaagcataaagcccagctgaatcggtaaaagtgtacaaagcagtcagaatattagtggtaacagtaaaagagaaatgagtaggaaaacccaaaaaactgaatcgtaacatacaacaatacggattgtgatggagactgcgtagatctgtccagtaaaacatgaaaaccaacaaaagttaaaaggaaattgtcatgaggcctcaatgatttgagatttcaaagaaatatggcactcacagtataatttttcattctctggaagatagcacgactggtcaaaacagcactgatgataacgctaagaccaggttcagtaagaacaatatccgatgcgctacgagctgcatcagtggcatcagcaactgcaatgcctatgtcagcctttttaagagcaggagcatcatttacaccatcacccgtcattccacatatatgtttcctggcttgtaatcgcttcactatctcatatttatgctctgcagaaaacccttgggcataagtgagaaattctgtttatagatgctggaactagtttcagaagtacatgaatttaccagggaagacacccgcaaagccatcagctttctctatgagctcatcgacaggtaaagcaactatcgactcatccttgttctgtccaagtaaagcggatgaggggtacatgttggttcccatccccaaacggcgcccagtctcttttcctatagccagttgatcccctatagagaagcctcaagcctttagcaaggataaattttatcttgacaagaaatgtcaaaatgacaacttgacaaggataaatgctataaggatcagactgaaatatcaatatgaaatggaaattcactaaatgctacgaaatgtttttcacctgtgatcattttaacactcacaccaagatttaaagcccttcttatcgtctcagcactgtcatgcctaggcggatcaaaaagaggcatgagacccacaaattgccaaggacctccagcactatccttcctcccttcaggaacatcctgcaaaagtacaaaaccttttcaaccttgaactttatatcaaattgctgtgactcaatatcttaagaatcttggaaagtagatcaccaattgacctggtacgccacagcaagagatcgcagacccctttcagcgaacttatcaataacagcatgaactctccgctcaatctctgatttattgtgtgcaagatttaagatctgaaacattttcacagaaggtaactgttcagactatgctctaactaaaaattgaaaattagtaaaatataggcacaactggcgataaagagcttacttgctcaggagcacctttgctcactctatgtgtgttaccctcattgtcaatatatgtcagagccgttctcttatcagtaggattgaaaggaagaaagtgaacctcctggataccagctcgtgcctacagaaaacggttgaccataagcgccaaagaaataaacagaaaacaaaggaagcttaataaatcttagaatgcagttcagtgaaaccaaatacatctttaggatctgccagcatcccgactatagcagcatctatagcatcttggttctctagtctggaggctcgagctgccatcaggacaacagtatctgcatccactcctttcatgaaaacttcaatcagatttttgtcaacagtaagtttattcaatgtcaaagtgcccgtcttgtcactgcaaagaacgtccatgccagccatttcctcaatcgccgtcattctcttagtgatagctccctgctgagatagtctgtgggagccaattgccatggtcacagacagaactgtaggcatggcaattggaattccaccaatgagaagcacaagaaggttatcaatcccagggcggtatgctcggtgttgaatagggtacatcacgacaatctcaatgagcatccccacagcaatagagcagatgcaaaagttcccaattgcagttaaaacctgtgcacatgtttgaataaattcaaaaataatattggtttgttccagttgaacaaagtccatgatagttgaagcgagttcaaaaatgagaatgtgggtgtgttaaacaagaatcgctagtaaagggaatgaaataacacatacctgttggaaatgaccaatttggtttgtcgtatcaacaaggtgagcagcctttccaaaaaaggtatggacgccagttgcgataacaactgcttcgatctctccttgtttgcatgtagaaccggaatagacaccatctccagaacttttggttactggtagagattcaccagtaagagcagactacacagcaatttcttaaaagcttcagcaaaataactataatttgataagtaacaaaagcttaagagaatcagacactattctctagacatccgaggtgactaagattgacactaatgaatactgatgatcagtttccaaacctgatcgatcttaaggggatcaccctcgagaaggcgtgcatcagctgggacgatatccccaagcttgatgctgattatatcaccgggaacgagaatcgcagcatcctgctcaccccaccttccatctcgaagaaccttcacatatacatttaacataaggaaaaatcaaatggtcaaccaaatgagttaaagagagtatccaacaaagcaaaacacataaacaaacaaaaaacataaaaaaactcggttataagaaacaattgaaaataagcatatagaacctttgctttcggggctagacgggccatgagagcagctgcagcgtttcctgcattgttctcctcaatgaaactgatggtggagttaatcacaagcagagtgataataccaacaaagtcttgccaatcaggaggttttccctgatacaaacattatcaagaacaaaaactaaaaaaagatatcaaaacaagtacaaagtaagagttaagaaaatagcttactcctccattagcaagcgcaatagccataatagcagcagcttccatcacccaggaaagagggttccacataaagcctaaaaacttaaggaatttgctttccttcaaaaaagataaaaatagcggttgtctacttcagcacaatacataaaacacattcagtagcaaaaacccaaactttcagaatatcagcaaaatcaaacttagtaacctttttctcttcgagtttgttatggccaaagagagcaagtctttcatcagcagcttgtgtagtgagaccttccttgctacatctcagattctcaaatacttcttcaattggcacattttcctggaaatttaaacacaatctcagaccattttcccttacaaagtttcacaaatttactaaagaaaatatgtaccagatcgaccgcttctttcaaaacagcctcgaggacctcgcgattgtcctccacagtcgtcgtcatcgcactgcaccgaaataaaacaccagcatgattatccaagaattctccatgaaagcatagtgatagaactcaagcaacaataaaaagaagcgaaacaacaaaggaaaatccaaaattacaccaaaatagttgaccagaaacggaacaatcggaaagcttaacggatgaaactccgtaccgagaaatagagaagaaatggctgttcgagtattcgtttcctaacaaactttgttgggaggaggacgacgaaatcgaagcgtagaagatgataaaaccgctatagtagtagtggcactaccttattatgagacacagtcaacaaataagactcaattttctttcttttgacggattttttcaagcgtcaggcgaacaaacataaaagccttattttaatagggaaatagtataaaagtgtatttagagaccaattaaagagattactattaatggcgtacttactactaaccaggcagcttaataaaaatgccggtaaagatatcgaatgttatttaatatattacctaccaagaaagcacatggatacgtacggatagtactattagggacaacactgattacaattttttcatcctacactttggattggtaatccttattactatgatacgagatatactgcatctaatgtaattgatacaaaaacgatatataaaaatactcggaaatttttcctgtaactctcctttgatccactatattgtattgttttaactacttaattttttttttggtaaggtgttttaactacttaattgttttctctatttgttaaaaattgtattacatatcaaatcttatatctctgatttcctttttttatttggccgcatcttttatccaaaatgatccaaaagactccaaagacaagatccaaaagctttttagcgttttaaggcgaagttgtaaagagatattgatagtttattactatatatgatgagaaattgagaatcataattatcctctatcggtacttagcattcagtcaacaatatttgaccaaagatcaatgaagtaaaaagaagatatatatgtacacagtttcttaaaatatatatatatatatattttaatttctctgactaattaactaatctttgtgaatgggtcaagagataaagaagcgtgcaagaaaagataattagagcataatcaaaccaattaactaaggtttcttattcgtcatactcatcatacgctcatccatactaagggactaattatgggaggagccactctttgagggattacctagaagctataataggttacgtgcacgtaaatgacattttggaatggattgatagataagttacaccatgttatttgtatcatcactttaattttgtagagtccgtaaaattttaaattttgttaatgtttttagtaatgttaagcacacttgtacaaattaatattttccgaaaattttatacggtttgctttttaagaagtgacatacctttagttagatttataattggtcaagtatggtttgtcacccctctttagcttcagttcgactatcagaagattttatgtttatgctaaattcttttctttttttaaatatgagtttattatttttagctcaaccatacataagtaaaccttaccaataaaccagtatcttaatctcaaaaaacaaattgtcaaacatataaactcccattggtcactttatattactgcaatacgagatttaccgtttaactaccaatttcaaaaacgttataattttttttctttcatttttcgtattgttactttttactgtttttaattattttgatattgattacaacttatctatctttcaaaaacgttgtatcgttttctattattaaagaaataggatccgaattgagattaaaattaaaagagtcgttgagggactaattaaacatgttaataaagataagatgtggatcccggttccggggacgggagagggaaggtcatgtgccattagggtaggaaccaccgagaggatgtgtcacgtgtcacgtgtgttggacttaggtgtcagaatggttttgaatggaaaaacaaaacaacgattctcagtagtcaataccccacacgatatcgtcatctttgttgtcttcattctttaaaataaataaattgaaaaggtactagtagttgtctagttccgtacggtacccgtccgtactctctagagcaataaatctttccatgaattttctttttctatctttctttcttttattcttaaaaatctatacttttgagtcttgacattgtatctatcttgtaaccttcaaattgtgagattagtagaaaaattgatggaattagtagaatcgcgagatctaatcaatttatatgaagagatataagtgaaacatatatatctgaaaagatttttttttttatacgagtacatcatcgaccatgtaatgtttgttctacggaaaaatgccaataaggtaaagaagttattgtgtaattgattttacgtcattttaatgaatataaataattatatgcaatctcacttcctctaaaaatcccacattcgttcttcgcaatatattatcataacttatctcgttttgttgcatttttcttccaaatgcatccatatagtatgaaagataaaacatatatataggattctataactctttttttctttatattttcacaaagatatgacaacatgaaactgtcttcatctacttcttctaatcagtccaataatcaacatttcaaactgattaggaccaccgtctgatccatttcaacaaaatccttctcttcatcgttccggttctcacgactagtcctgtggttcctatgtctctttttgactaatcaagctttttattgatgtatcacaatttttttttctttacttctgaggcacctatgacctatctaatgttatctcttaagaaaattttaatgagagatacatttgcttcatggacttcgatgattatgggcctattatatcattttaggcccatttgaaaattgaagttttgtgggtctcaaattaagtcaatacagtcagatgttgtgtgtccgagagcaagttaataatcatggacatgttaaagaatggaatcctctttttcttgtttattcgcatgtctgtttcttacagcattggtttgtctaaagactaaaattaacacgttatatgtttacaaaataaaaaaaaaggtaacatgctatgtagttttgtaattataattatgattatgatattgtaaaacaaatttggaaaatataaataagatggaaagagagaaaactaaaatagaataagactgaagaatacaaaaatgtaaaaaaaaaatcagaaacttttccatatatataaaattaagaatgtgaaaataagccaaaaacagataaaaagagagaattgggtaacaaaataataataattactcttttgtttaacgtaacggtggaaacagccttccctcttccctagtctcccacgcttctgtttcgcattttcccccattttctccggcgacggccaatcatcatcaaccgccggcgaaaacctcagattcgtgaatctgattcattcattccgtgattaagatgggtgtagattactacaatatactaaaggtgaatcacaacgcgacggaggatgatctcaagaaagcttacaagcgtctcgccatgatttggcatcccgataagaatccatcgacgcgtcgagacgaagctgaagccaaattcaaacggatctccgaagcttacgatgttctctctgatcctcagaaacgtcagatctacgatctttacggcgaggaaggtcttaaatctggcaaaatccctaattcttcttcatcggaggcttcttcttcttcttcttcttcctcctcgagatatcctcactttcatcagcacaggccgcagcatccgcctaacgcttcgtcgtttcgttttaaccctagagacgcggaggacatctatgctgagttctttggatctgaaaatggtggaggaagcaataatgctggtgggagaggaaacagagcgtttaggaatggtcatttcaacaccggtggtgccaatggttatagcggtgagatgaggaaagttccagctatggagaatccattgcctgtgagtttggaggatctgtataaaggtgtggtgaagaagatgcggataactagaaatgtctatgatgcttctgggtatgttcctcttctctatctccctctctacatatcggaatctagaactagaagaatctttcctttaggcgtatttggatgaactaatgttagaatactgttatgattcgtgttgcaggagaatgatggtagaggcggagatattgcctatagaaataaaacctggttggaagaaaggaacaaagctgacatttcctaagaaaggcaatgaagagcctggaatcataccagcagatattgtattcgtggttgaagagaagccacatcctgtttacaagagagatgggaacgatcttttggtcagtcaggagataactctacttgaagctttaactggtaagactgtcaatctgatcacgcttgatggaaggactctcatgatcccattgacggagatcattaaacctgatcatgagattgttgttccaaacgaaggaatgcctatctctaaagaacctggaaaaaagggtaacttgaaactgaagcttagtgtgaaatacccgtcgaggctcacatcggatcagaaattcgagctaaagagagttcttggtggggtctcatgaggaagtcattgatgaatgtagatagcaaaagtagaggagatgatagattgtgaatggtaggagggattcttctaaggaggcttggatttgagagccgaagaaccaacacaagctttgcttctgtctttttacttctcttgtttgaaattagacctttttcccctttgtttaattatttcattgatttgatttgatttcgctgccttctaatgtttagagagtgtgtactccaaggtatgctttgttacctatttatcttatttgataaaaatttctatatctctcactcttattacttatcttcatgactatgtatggtaaaacttagagtagagagctacgtaatcagagagttatggatttcattctgtttgcttttgacacgaagatcattaaggctatgttaaactttaagaacaacccacttaccgttccagctttaaccaatacgatatccaccaatccattcacaagccaagacatgttagcctaaaccaggatcagattggtcatctgaagtacacttttggtagctagcaagacagccacaaacccttgttccagtaacttggggaaatgagattaagaagtcagaataactcaacaagaatgagaaagtaaagaacaaatatttattcataggaactgtgaaaagagtggtaaaactcaatgtacagttttgtgacaaatatgacaaatatattggattcactcattcctcacctcttcttaaaaaaacttatagatgcaataaaaagatgtataggatcccaaaaagaggaaaaaacctattgatgaaaatgttttaagcagtggtggagactgggaagagcttttccaccatgttgttggagaggattctatttgggtccagctccctacgtgctttgttgtatgcatccactgggaaacgttttcttattcttgcctgtaaggcttcaagttcttctttgtcttttggtatctgattatataaatatcaaacagaaaacattagaaattgtctacactctaaatagttacctcaacagattctcattccctttgcttacttctcacaatgaggacagttgtagttcaagcagaaaaaatgtaattaagatacagagactttttgtgagtgaatcagaaggacatagttaagtgagaatgatggtatctgtgtgttaagatacaagaatctcatatttagattagaaaatctacgattacctcaattttagcccaatgttcatacgcagaaaattgatcccacaattgtttctgtgtcaaatgtctatagtggaaaaattcatctgtgatgtcctttctctggcgagggtctgctgtcgggaggtacatgattataccaacctgagacaaaatgtaatgtagcatattataactgtagatgactagcatttgaaagagaaaaaaggcaaacagtcggtgttggaacaaggttggccaacaacaaaaatctaccaagtgaaacaacaatccagcacctaagagtacagtatgtaacatcatttttacggtttcttctttgtctatgaacattttaacatcaatatatcacatgttttcctccaccacaaaggcagagccacaaaacaagcttcctatagattgacaccaatatctcttcatactttcatgaaagtcaaagagaagtaaatggaaggataaacgacataaaacaagagttacccatgagaaaatatcatcctctgaagtgctgaatgcaggactaatggggctcttacttcgagctgtccatcgctgctctattggagcaggtgctggtattgcttccttttctattagttttttcagctcttctatgtattcaaggtctttcatgctagggttggcgagggttccagcaggaaaacaagattctgacacccactgctgaccaccacagtcaaagcccagaatttcatcactccaccctactctatatccttctgattttttccaaaactctgcctcagcttgatttacttttgcaacgtgaacgtcattgagaggatcaagggcaagtagtttgtctctcaactctgtaaatgaaagctcctgtatgtctggctcactgctgtcaggagacttcttaccagagtcctggaccctatacatcatagtaaaaaattattttgcatttcattcagtcctccacattagagaaatcaagttacacataagacttaagcataacgatacctatacttcacaatgctctctctgtagagatcacggacatgctgtacagcctcatctgtagtgtactttggtttgtccttaggtggcccactccattttgatacaggattgcatgttacaaccacgactgtgtcggtataaggaatatataggtacttaacatgcttgtttgcagagagcaattttctgaacagccagaaacaaaacaaaagttaggaaacgttccaccctgagccaatttatgggatcaatttgcttcaaagtagagggagtgatttcccaaatgctagaatgcactatgccaaatgatatgggcagtactaaaaagtgaaaaaaactttaagctcttgcatcaatctgatacttctctgataatctgaccagaagaaaagtcgtatactgagcatgattttctaagctggagccataatatggagactaatatagcgaaagttagcgatacttaacttgtgatttttcttgatttcttgcaagtttgagacgtatgtgtgttccacaagttcatgtcttgcaacgcattggagggtgacctcagcaacaactccaagtccaccaaggccacatcgagctagatgaaagagctccggatctttctctcttgaaagttcaattgttcccttcgcaggagtaaccagcttcatactgatcacctgctcatcaataggaggcaatctagcacctgtcccatgtgccccaacctgaacgtaaacaaaaatatagactctaaaaacctcaaagcacaagataaagacgaacaactaaaattgtttcagattctccattagtttcacaaccctagacttcacacaagggagagaaacatatgcaaacctgaataataccaccaatctgctgctctctaatggaggcaaagttctgaagagtaagaccatagtctttaatggcgtcaaccaattgctggaccctaatcccagcctgcaccgtaactctcttcttctctttatccacctctagaactttatccataagcgccagattcaccatcccagagcgagacaaaccaatcccattaggcgagagacccgatccaacgggacgaatccttaacttcttctcatgagattccttaacaagagcttcgagatcagcaagattctccggttgattaaagttcctagtctgtacctcatgagtaccactccaattagagacagtgtgaagatcttcaggtaaaggagcgtaacggaagatttgagccttcttgtgtttagcattctcagggaatggaaatgagaaataggtagcaactccagagaagatagcgagtgctgcgtatccggcgtatttacggaattgagcttctgaggcggtggccggaggcggaggtggaggacgtggcggtggcggcggtggtggtgtcaatgtttgaccggtggtgcagagagtacgatgaggcgaaaatgaggaacggatggtggatgaagacggagatagggttccgagagaatggccgacggagcgtcggagaagaagtgaccggagcattttttttgtttaacttcaggcgatctgaacctgagggaaatgttcttgtacaggatcgggtttagtgatttaagaaagtttccattataccctgattttatttctgttttcataatttgagccgagtaatttgttaatgaacaaattggtaactagtttgtccacattcaaaaaccaaacaaaaccagaaattttattgtagacttgtagttttgggccttttggttttctgtcccgcatgagaatcgggtcgaacggttatgctcgagtgactagacaaagtagttcactagtgagccatgcattatttatttattttttttcactaagtgttgtcttcatttcattaagttcacggttacaaaaagtgttataatggctctgccatttacagctttgaagacatacacataaacaggtaaacaagcaaccatggcatcagaaaccaacaaggttagccatgttgcataccagaaagttacaagtaaacgttaaaacataacaactgcagctatagagtatgtcttgacccaaaaagtgttatgaaggccatactactgaggcagattattccaaagcatggatctgcatctgttgaaatcaatgcagtcctaaataaaaaaaatgacagaattcatagagtgtttatcttttctttggagggttcagaatccctcccttcatgtgcgctttgtcttgttcatcatgagttcctttctcttcttgcctcttccttgtttcccttgtttccacccctcttgaagattgaccaacttcaaaaacccgacgagaacccgttgagagtgctgttccaactgaaggcgtgatattagaatcagttgagacctgttgaccttgacagagcccttgatagtaagtccctcgaccctgatgattaaggccttctcttggagcaggaaaattcggatgggctgcaagaaactctccatgattcagtggaggggtaacaattcttggtggagggagcacaggtgctggaaatgaagactccgtcatttgagactgagaattcatagacgatctaagcctttcatcatggaagacagctctttcccttccataattaggtagccttggtctataagggcaatagttcctgtgatgtgtaactctgaagcagctactacaaatcctcctcaatctctcatattggaacctgatgagagcagtttccccagaatcaaaagtgattctttggaagaaacgaagcctatcagtgattccaattctaactctgactctaatataagcaatttgagtcatcgttgcatcatggaagtccagcgtgatgatctcaccaatctcatgagcaatctccaaagctgtctcctcacaaacatagagaagaggaatgcctcgcatctgcacccaaagatctatggtagtcacaaaatttaagacaggagcaggctcccatctatgatttgcaacaaaccaattattgaaaagccacagttcccttctttgcactgaaagtaaatcaacttcattctgaaacaagaactgaacataagtagcatccagcattctaccactgaaagccatgcattatttaatctacttattcgagaaaatttatctcaatttggaaatatacgatgcatttgaatagcaatccattaatataggattagatacacccattaaacacgtgttaaattgataagcaataaataaattttaaaaaatgaaaatgatacagaatcaaccatcttagttttaaaatgatattttttttaattgataaccaaattgataaaaaaaatctcaatctaatgtaattttaaaatgatatttttttggttcatattaactaatcattaatatatatattcaatcttcaacataaagaatgaaaacaaaatattattagaaatatatttaaaaattgaatttcacaaaatgaggttatatgataagacgagtttggatcgatattaagacggtacactataccacaagtaaagtcttagaattattaattaaaatataattaaataatctttaacactaaacaaaacaaacaatcttaataaaacatatgtaacttaaaatttaaactttttagttataaaaattgatctagggtgtactgaagggtaaaatctaagggttgtacataaaataatatagaaatagagttatatatttataaaatacaaaaaatagattatatataactaatctatcaaaaaattacattttcagttttttttttaataaatagtcccgcattgtaccgcatgttaaaatctagttttaatagatagaaattagtaattgttccaaaaaacaaaacataaaatgtaattatataaaaatggtctacatcaacttggtaacataaggtagatttgaatcactctattttggatagtcactatactattcaaatgttgatttggtaaaccgaaattgtaattagcttcgtttttcagataacaataaccgcaacaagtagataacacatggtttaagcgtctcgattgtaagatatacatttcagtagcttgtcaattgtcataaatgactacaatatcagcaggtgaaaactatattgatccatacagaactaactaaacactaaatgcattaatatttcataccaaagagcaagtttagttagtgcacaattcaaatgcggtttgctaaagtgcagacggttcaaccgtaccgcttcaccgcctttttctataaagcgaaccggtgtgtaaatctgagttgtttactaaaatctccttttctcctattttggcatttcggtttaatgattattttcccctggcttcgaactccacacagagagcaaaacgacgactcttgttctactctctctatcttgttccccacaccagctttctccgccgatcttccgccatactacggtaccggaatctccgagatgccaccgtatgttgactgttaattaatttccggtttgactatctctacgcatttactggggcgtatataatacacacacacacacgcgtatacatgccgattaaattaggggttttaagctgaatcgtggatgggccagaagaagaaaacctccgcgtctcgctccaaacaaccgccgtcttctacggctgtgacggtggtagaggtggagccgtctgagatttccgcttgtagcttcaacgatgggggtttttccggaccagacgctaatggtgagccgttggattcatctgtcgtcaagctagaatgcgagaaggcactgaagtcgtttggacgggggagctataacaaggcgattcgtctgataaaggattcgtgctctcgccaccaagactctgccctaattcaccgtgttcagggaactatctgcgtgaaggttgctgctgtctacgaggatctcgctacgaaacagaagtatctccgaaatgcaatcgaatctgctagaaaagctgtggagctgtctcctaactcgattgagtttgggcatttttatgccaacttgctttatgaggctgctaacgaagggaagagagagtacgaggaggttgtgcaagagtgccaccgtgctctctccatcgaatatccgattgatcctgctagagagagtcttcaggatgagactcagctgaagatattgacacctgaggctcgtattgctcatttccaggatgagctcaggtcactgatacagaagtctaacatttattcattgtccacttggatgcagaccttgggaaatggtgaagagaaatttaggttgatccctcttaggagaatggccgaggatcctattgagagtaacttgattcagtccaggaggcctaatgagattaaaaaatctaccaagactaatgaagagaggaggaaggagattgaagtgagggtagctgcgcataggttgttgcagcagaagtcagagtcttccccgtcggagaatgtagaagctgttaacaacaagggatcagattcagcattagccgcggggccaagaagcggggagagaagaaagcatgggaatgcaaggaaaaatggctccacagcggatagaagggatcgggttaggtcatactgggattctttgagcaaagaaatgaagaaagaattcctaagagttaagtttagtgatcttaagagtcactttagtggttcaaaggatgggcaagcatatgagattgttagcgaggcactgtccttttgtgaggccaataagacttggaggttctgggcttgctgccggtgtagtcaaaacttcatagagtctgaggctcatatgcatcatattgtgcaggcgcacatgggtaacgtcttacctaagatgcaaatggttttgccacaaattgtcgacactgagaggattgatatgctttttaagtccccatggaaaccattggatctctctgctacactgaaattgcttcgaagtcagcagaaaatacaaaattctgagtttgatgaatttcactctggagataatatggatggtggtgacgattgcttcaaggatgcatggaatgatactacaccagatggagatacttgcaacggttggaatgagaatgaatctgaagaggaggttaagctatcgatcgcgtttcctcctcctgatggatggcctatatctgatgatcctgaacgtgcaaagctccttgaaaaaatccgtgcagcctttgagcaactgatcagacacaaatatttagctgccagccatcatgataaggtgatacaatttacgctggatgaactccagaatctaccctcggtttcgcaattcttaaatcgtggcttgaacaagtcacccttatgcatctgctttttgggagcttcccatctcagcaaaatcctcaaattcctgcaggacttatctcaggcctgtggattgagtcgatattctgaacaaagtaacccccacgatgagattaattttggtgacctgggtcgtgaagtcacagaggagattcttcttgatagtgaagattcatgtcttcttatggatgaaaaattgcttggcactgagtgcatccaagaaaaatatatgggctcagcatttaataatgtaactatagcaagttctggagatattgctaatggaaatgatgtgtcttctggtgcggatggatttctttcatggatcttcacaggaccctctagcgaggaacaagttgtgtcatggatgcgcacaaaggaagataaaactaatcaaggactggagatcatgcagcatcttgagaaggagttctatcacttgcagaacctctgcgagagaaaatgcgagcacttaagctatgagggagcactgcagactgtcgaggatctttgtcttgaagaaggccggaagagggagacttcagcagaatttacccatgaaagctatgaaactgtgctgaggaaacgaagagaagagctaaatgagagtgaccatgagttgttgtttatcagtagcaggtttgagttagatgctataacaaatgttttgaaagatgccgaaactcttaaccacaatcaatttggatatgaagaatcatatggctgcactagttctcagcttcgtgatctggaatctggtgaagctgatgaatgggggataaaggattccttacatgaggctgacagtttcatagagattgcgattcagaaacaaaaagagcagttgtctgcagaggtaagcttttctatctttacgcaacaccactgcaataatcaattaatgcctttctgattttaaaataatctgtacatgtgctatcacagcttagcagaatcgatgcacaaatgatgcgaaatgtcactgggatgcagcaattagagctaaagcttggaccagtttcctccaacgattatcagatagtattgttacctttggtgaagtcctacatgcgggtaagtatctaactcttttgaccttgttactttttcttccattgtgttgctgtgttctttcaggttctaattggcatttccatcttaatctccccatttccctctctcgctctctctctctctctctctctctctctctctctctctctctccaggcacatttggaggcgttagcagagaaagatgccactgagaagtctgatgctgcaagagaagccttacttgttgagctagctcttgattctaagaaggaggctcgaggaagaaatgataattcaaaaaacacgctggaaaagtccaaggacaagaaaaagattaaagacactaggaaagtgaaggatatgaaggttcgaactaatctgttgtctactttttaggtacttcttgtctatatttgtaactaactttttaatttttttgttataggcaactattggaagcgaccatcgctccaatgctgattcagttgaacacaggtgaagatctgccttgttcataatttttacttaagcgggtgtaacctggaaaatctttgtttctgaaaatgttggtggtttataatatgtcgttgatttacctgctaatttcttgttccagcccccttccggttgcacctgtcggcgatcattcagaggctgacattgtttctgaagctgttgaagctttaaaagaagaggaagaggaatataaacgccaaatagagctagaggaggaggagagaaaacttgaaaaaaccctagagtatcagagaagaattgaggatgaagctaaggagaagcacatggcagaacaacaaaagaaatacagctcttcagttcccatgaatgttgcaaagacagtgtataatgggtgcacagataatgaagttgattatttagttttacaaggacaagaaaaatccataaatcaggtaacaatagagtgacaaggtggtggagttatgttttttcaatcatcgcttgaaattaatttctggggttctttgctttaccaggagaaaaggaatggacgacttgatgacctggaaggagccagtgtgaatacaaatggagttttcccgtcaacaaatcattctgcgatatctgatactgcaaaggtgcagaatgtaaaatcccaaaaaggttagcattggtttcgaatatgaaaatatgtgtctactgacctttctgaggcacttatattgttttttcttttttttttgttgtagtagtgcctaacggcacagctatgcaagctggtattttccaatctgatcaacgaactgggaggagaactagacgccaaaaagcttcaaacaagttagctgatggaaaatatccggtcacacctcctgagaccgaaaatagtaaatctcagttgtcaggcaccaacggcgagagacattctgaaactctacgtaacaatggtggtaagtgacattttttttttttttttttttttttttttgtcctagaatcattttctttttctcatgttttcaaagcactgatagttgtgatctatagatgatctgatttttcttcttgagcttattgtttttttctgaacataattattaatttattagatgtgaccagtaaaggcacaaatgaagccgttagatttcttaaaactgatacttctgtaaccggtgtatcttgtttatgcttttatgtcaacgaggaattacattatctacattgattaccagcaattgttttctaacatcattcatcttgcattctagatgtgggaacaaagacattaagacaattacaagctgaagacgatgacgaagaaaggtttcaagctgacatgcaaagggcagtgcttcaaagccttggtagtttttcaacatccttgtttatatatctgatatcatgtctgacagttaacattttgcgatattttgctaagtgcccattttgtcactattgtctgactgactgtcatttgtatgaagaatggtgtattgtgtataccacttttcttcatcccagtgcactttttctttttatctgattactttaggtgtctgaaactattttttctccagcttacttatgccaacagctgctacgttttattttagaatttttagcatatttgttctgtaatcattttggggtgacaaaaaccctcgatatgaagcatctgacaccagaacatgttttttcaacgcagacgtgtaccaaggaggtagaaatatggcgtcatgtttgaggacaccgctggaagtaaacaatgatgggggtttatctgatgacacaatggagtctaggagctcaacaggagttaccatatttggcacaggtcttcagaatgaagttggcgaatacaattgctttttaaatgttatcatacaggtaacccttcacttttcataaacggtttgagttcttgggaatatagtatctataattccagcttaaagacttatttttgctgaaagctattttgttttgttttgatcttagtctctatggaatttggagctgtttcgagctgagttcttacggagttcaacacgagagcaccatcacgtgggagatccttgtgttgtctgctctttgtatgaaatctttaccgctttgagcgctgcttcaagtgaaaaacaaaatgaacctgtggcaccttcatctctcaggattgctttaagtaatttgtatccagatagtagtttcttccaagaggtaaaagaatttgattactggttttaaatgtttatcctaatacaatgtaaaccttcatttcattaattagcctaatcctgggcgtcatatggtggacaggctcagatgaacgatgcttcagaagtactggctgtgatctttgactgccttcatcgctcatttgctcaaagttcaagcgtgtctgatgtggattcctcagacagcaactgtactggttcatgggactgtgccaaccgcacatgtattgcccattctttgtttggaatggatatttttgagcaactgaattgctacagctgtgggctggagtccaggcatttgaagtacacttcctttttccataacatcaacgctagtgccctacgcaccatgaaggtatcgtatgagtgttcatttgattgcgttttcacatatataatttgattattcactgtggttttgtcccactttacgcctaataggttacatgcgctgaaaattcatttgatgaacttcttaaccttgtcgagatgaaccatcaactagcctgtgatcccgaaaccggtgggtgtgggaaactcaaccatatccaccatattctcactactccaccacatgtatttactacaggtaaaacttatttttaggattttgatgaatggaaattttttcagactgctgatatttgtgtcttgtcactaattattttggggctggcagttttagggtggcaaaacacatgtgagactgtagaagacatagcagctactcttgcagccttgaataccgagatagacatcaacatcatgtaccgtggtctggaccctaagagcacatatagcttagtttctgtggtacgcatttcttcctcttcttccctatgatattatcagaagagtcgttaaaacaccagctatgtgctgtgttttccttgtgtgctttcaccctaaaaacctcaaggtaacaaattgttcttttgctatttctgcaactccaggtttgttattatggacagcattatcattgttttgcacatagtcgtgagcacgatcagtggatcatgtacgatgacaaaaccgtcaaggtaagattatcaatgcaatgggttttgcgggcagcagatacactcgtggacattatcacccagtttttgtaatatctttcaggtgatcggtagctggatcgatgttctttcaatgtgtgaaagaggacacttgcagccacaggttcttctctacgagagacgttaaaataaaaaagaagcaaaacaaatgcagaccaagtagagttctgttgctacaatttaggagatctcgtaagtacatactacaaaggaagtaagtacgtttttttgacaagcagaagtaaactcgagaggaaagaatgtgattttacactcatctcagtggttctaacttctaagaggatggggaagacgattttgtctttaaaatttaagcaaaagtgttttcagtggaagaggtcatagaagaagatatcatgtagttttcttggttacatccttgtcacattaaggattatatgttcatataaatctatttcatcggtcatctctatagatcatatcatcattatacatatatcatatcttgtcaactaatgaaaatgaagtcagaagttaggagagaaattgcagaaactctaatccaatgaaatctctacatatcattcttttaacatttactatgtgactatgtagtagtatatgtttcttattttcttttcaatccgactgtgtttaacacttaggacttaaccgtaataaaacgacatttgaaattaggatttgtgatcgggtaagtgattcgaacattagaaagcaaactaacctatgaggctatgactttagttggtcgagagtcggctttcatatgcggcatttgcggggtcaatcccgcaaagaggcagcctgaaggcactcactagggatagctcttacaatgagcaagttgacaacctcatgctccttgccgatcctgatgaatatctgtcacagtgggcaagttgtgccagcatgtagcggttccaaaaaacacagcggttcaattcgcaaaccgagtagttcgcttcgtctggtaaagtaaaccataaaataccgatggttcaactagaaataattactaatcgaagtaaaccggtttgtaatcgctaatgtaaatctcttttttggtttagtgacattcttctgctccgtagcgagagagagagagagagcacaacaacgactcctgtgttactctctctacctctatcccctcaccaacaatctccgccgtaatacgtggccgggatctctcaggcgacgccgtctgttgactgtaatttaatatccgattttgaccatctttgcccatttggtggcgcgtatatatatatacgtacgcgtagagtattcttcatgccgataaaattaaggtatttaagctgaatcgtggatgggtcagaagaaaaaagctcccgcgccgttggattcggctctgatcaagctcgaatgcgagaaggcactgaagtcattcggtcgtgggagctacaacaaagcgattcgtctcattaaggattcatgctctcgccatcaagactctgccctaatccaccgtgttcagggaactatctgcgtgaaggttgctgctgtctacgaagatctagctacgaaacagaagtatctccggaatgcaattgaatctgctagaaaagctgtggagttgtctcctgattcgattgagtttgggcatttttatgccaacttgctttacgaggctgctaatgatggaaagagagagtacgacgaagttgtgcaagagtgtcatcgtgctctctctatcgaaaatccgattgatcctgctaaagagagtttgcaggatgaaactcagcttaagatattgacacctgaggctcgtattgttcatgtgcaggatgagctcaggtcactaatacagaaatccaacattagttcattgtccacttggatgaataatctgggaaaaggtgaagagaagtttcggttgatacctattaggagaatggctgaggatcctattgagagtaacttggttcagaccaggaggcctaatgagattaaaaaggctaacaagagtattgaagagataaggaaggaggttgaagttagggtagctgcagctaggttgttgcagcagaagtcagagtgtgagaatgtaggcgctgttgacaacaagggatcagatgcaacattaggttcggggaagagaagcggtgagaggagaaagcatgggaatgcaaggagaaacggctccacagcggatagaagggatcgggttaagtcatactgggattctatgagcaaagaaatgaagaaacaattgcttagagttaagcttagcgatcttaagagtcattttagtgcttcaaaggatgggaatgaaaatgagattattagtgaagctctttccttttgtgaggccaataagacttggaggttctgggtttgctgccagtgtagcgaaaagttcataaagtctgaggcttatatgcatcatattgtgcaggtgcacatgggtaatgtcttacctaagatgcaaatggttctgcctcaaagttttgacactgagaggattgatatgcttcttacttccccatggaaaccgttggatctctctgctgcggtaaaatggcttcgcagtcggcagaaaatccaaaactctgagtttagtgagtttcacgctggagataatatggatgacggtgacgattgcttcaaggatgcacggaatgatacttcaccagagaaagaaagccttggagactcttgcaagggttgtgatgagaatgacccagaagaaggtaagctgtcaatcacatttcctcctcctgatggatggcctatatctgatgatcctgaacgtgcaaagctccttgaaaaaatccgtgcagcctttgagctactgatcagacacaaatatttagctgccagccatcatgataaggtgatacagtttacgctggatgaacttcagaatcttgcctcggtgtcacaattcttaaatcgtagcttgaaccagtcacccatatgcatctgctttttgggagcttcccagctcagaaaaattctcaaattcctgcaggacttgtctcaggcctgtggattgagtcgatattctgaacaaagtaaccccaacgatgaatttaattttggggccctgtgtagagaagttacagaggagattcttcttgatggtgaagattcatgtcttcttttggatgaaaaattgcttggcactgagtgcatccaagagatatatatgggctcagcattgcataatgtagctgtagcaagttctggggatattgctaatggaaatgatgtgtcttctggtgcggatggatttctttcatggatcttcacaggaccctctagcgaggaacaagttgtgtcatggatgcgcacaaaggaagagaaaacaaatcaaggactggagatcatgcaacatcttgagaaggagttctatcacttgcagaacctctgcgagagaaaatgcgagcacttaagctacgagggagcactgcagactgttgaggatctttgtcttgaagaaagccggaagagggagacttcagcagagtttacccatgaaagctatgaatctgtgctgaggaaacgaagagaagagctaaatgaaaatgaccttgagttggtgtttatcagtagtaggtttgagttagatgctttaacaaatgtgttgaaagatgctgaaactcttaaccacaatcaatttggatatgaagaatcatatggctgcacgagttctcagctacgtgatctggaatctggtgaagctgatgaatgggggatgaaagattccttacatgaggctgacagtttcatagaggttgcgatccagaaacaaaaagagcaattgtctgcagaggtaaccttttctatcaacacgactgcgatgatcactaactgcctttctgctttaaaagtaatctctaaatgtgatatcacagcttagcagaattgacgcgcaaatgatgcgaaatgtcactgggatgcagcaattagagctaaagcttggaccggtttcctccaacgattatcagatagtattgttacctttggtgaagtcctacatgcgtgttagtatctaaatcttttgaccttgttactttttattccatcggttgcagtgtactttcaggttctaattggcatttccatctaatttctccctctttgtctctcttcaggcacatttggaggcgttggcagagaaagatgccactgagaagtctgatgctgcaagagaagcgttactttttgagctagctcttgattctaagaaggagggtcgaggaagaaatgataattcaaaacacacgctggaaaagtcgaaggacaagaaaaagattaaagacactaggaaactgaagaatttgaaggttcaaatttatttgttgtttacgttttaggtatttcttgtctatatttgtaactagctttaatgttttgttataggctactattggaaacgaccatcgcttcaatggtgactcaattgagcacaggtgaagatctgctttgaacataatttactttaagatggtgtaacctgggaaatctttgtttctgtaaatgttggtggtgaatgatgtgaatgatttcgttttccagcctcctttcggttgcatcttttggtgatcattcagaggctgacgttgtttctgaagccattgaagcgttaagtgatgaggaagaggaatacagacgttgtaacgagttagaggaagaggagaggaagcttgcaaaaactctagagtatcaaagaagaattgagaatgaagctaaggagaagcacatcgccgaacaaaaaaagaaatacagctgttcagatccgatgaatgtgacagaggcagtgtatgatgattgcatagaaaatttctttgatgatgctgatttacaagaacaagaaaaacccataaatcaggtaacaatagagtgacaaggttgtggaggtgtgatttttgtatagaatttatcattttatctcttgaaattaatttctgggtttctttgctttactaggagaaatggaataaacaacttgatgacttggaaggagccaaagtgaatataaatggagttttcccgtcaacaaatcattgtgtgatatctgatactgcaaaggtgctggatgtaatatcccaagaaggttagtggtcttcgagtatgaaaatatgtgtctagtgatctttgtgaggcacttatatttgactttttgttttgcagtagtgcctaacggtatagctattcaagctggtgttttccaatctgatcaacgccctgggaggaggggtagacgccaaaaagcttcaaacaagttggttgatggaaaatatcaggtcacactttctgagagcgaggatagtaaatctcagaggtcaggcaccgacagtgagagacaatctgaaactctacgtagcaatggtggtaagactttatttttccaattattgtcctagatccttctctttgtctcgttgtttttaaagcattgatagtttgaattgtagatgatatgatacggatctatctgtcggaacttggaactaatgaaatagtttagatctctacaacaagtgtatcttgatttttgcgttctgtcaacgaggaatgacagtatttgcattaatttcaacactatttttttctaatattattgatctagcattcaatattgtatcctggtgatgtagatgcgggaccaaagacattaagacaattacaagctgaagacgatgaagaagaaagatttcaagctgaccttaaaagggcaaaacttcaaagccttggtaggttttcaaccatccttgtttacatatcatgtctgacaggcatttgtatgaagcatggtttactgtatacatataccacttccctccatctctgtacacattcttttatctatttcttgtagacatatacatatatctttttttttctcatgctttgcttatgccaacagctgctaccttctcttttagaattttctgtgataatattggggtgacaaaggcccttgatatgaagcatctgacatcagcacattttgtttgaacccagatgtgtaccgaggtcgtagaaatatgacatcatgtttgaagacatctctggaagacaacaatgattgggttttatctgatgtcacaaaggaatctcagagttcgcccggagttgccatatttggcacaggtcttcagaatgaagttggcgaatacaattgctttttaaatgttatcatacaggtaatcttcacttctcataaactgtttagttttttgggtatcaatgtctataatttccagcttaaaagttttccgtttttttatttattttgattttggtatgattttagtctctgtggaatctggggatgtttcgggctgagttcttgcggagctcaacactagagcaccatcactttggagatccttgtgttgtctgctcattgtatgcgatttttacagctttaagtactgcttcgagtgaaacacgaaaagaacctgttgctccttcatctctcaggattgctttaagtaacttgtatcctgatagcagtttcttccaagaggtaaagaatcaatctctggttttacagtttaagctttttgttttcataaaggagcctaaacttgggcgtcatatggtggacaggctcagatgaacgatgcttcagaagtattggccgtaatcttcgactgccttcatcgctcatttgctcaaagttcaagcgtgtctgacacagaatctgctgagagcaacagtacgggctcatgggactgtgccaatcgctcatgtattgcccattctctgtttggaatggatgtttctgagcaattgaattgctacagctgtgggctggagtccaggcatttgaagtacacttcctttttccataacatcaacgctagtgccctacgcaccatgaaggtatcatatgagtgttcattagacgtgcgttttcgcatatattattagattattcactttggttttgtccctctttacgcctaataggttacatgcgctgaaaattcatttgacgaacttctaaatcttgtcgagatgaaccatcaactagcttgtgatcgcgaagctggtgggtgtgggaaacgcaaccatatccaccatattctcaccactccaccacatgtttttactataggtaaaaccttttctaggattctgatgactgcaaaccttttctgatcactgatattttgggacttgcagttttagggtggcaaaacacatgtgagactgtagaagacatagccgctactcttgcagctttgaatacagagatagacatcagcatcatgtaccgtggtgtggaccctaagaacacatatagcttagtttccgtggtacgcatttcttcttcttcttccctatgacagtacaagacaaatggtgtcgaacttgaaactgcctgtactttgtgttttcattgtttgctttcaccctaaaatgttttttttttgtttggtatctctgcaactccaggtttgttattatggacagcattatcactgttttgcatatagtcatgagcacgatcagtggatcatgtacgatgaccaaaacgtcaaggtaagactttcctttcaccgcactttgcaggcagatacacttgttgacattatcacacatttgatgtaatatcttcaggttatcggtagctggagtgatgttctttctatgtgtaagagaggacatttgcaaccacaggttcttctctacgaaaagaaactttaaattagaaaacaaaagtaaaaacagagcaagtagagttacgttgcgacagatctcccaaagtacaaactgcaaagaaagtaagtactattttttgataatcgaaaactcgagaggaagaaatgtgatttttactcatctcagtagtttaaagaggatggggaagaagattgtctttaagattaaagcattagtggtttcagtggagaggttttagaagatgtcatatagttaaagtaatcttggccaaatcattgtcacattaagcattatatgttcatagaaattcccacaccaatgtggagtacttaaagatgtggggatcggatcatagaccaattctagcatctatacaatcaagtccggaaaaagtttcgagaaaatttatgtttgataaaagatggattggaaaaccaggacttaaaaaagcagtgttagaaggatggagcggagaaggtttgaaggaagaccgccccattatgaaaaaaatctagaactgcaaaagagttatctccatatggaagaaatcaacccgaacaaattcggaaatgcttattaaagaactccatgataagattgaggaaaattatgctgatgatagtgcttctctagaagagcttcgagatcttaagaaaagattgggagaagctt

SEQ ID NO: 494 - DNA, 103889 bp, Arabidopsis thaliana
aagcttttgatgatgaaggaaatcctacaaaggttttttttttgttttccctttggtcctcttttggtcacggatattaaattaactattcaaagtattttgggagacagtggtggaattaaagaaatagtatctggttcatttatttatcgccgcttaggtttatgctatgtttatttttttctttgtagcttgtattgactgcctaaagatatgtagatataatttttctcgttgttcttccctgccaggctgctgagggttttagccgcagatatggcgttccattggaaaaattgtacagaaaagtttctggtgggtgcatccatattagcatattctgttagcaggatcttgtttcttgttacccaacttcagacttcttcctttttctttgttttctaggttgtgatattgcttttttttatatagttcttttcattgttatcttttttttgtctttatttcagggaagacagaatatgtacatgcacgagttacagagccagctcgacttgctttggaggttcttttcctctactctttttgttatgctaagggactgttattttcatctttcatgaaagacttagtatatccattaacttagcaaattatttttatttttattttttttggacaaaaacccaacttagcaaattattgatgctcactcttttcctcttacttttcgtatgatgctcacacttttcctcacacttcactatattggcttctgagtttttcgtggagagaaaaatacaactatttgctaagcatacattttctttttgggaccttgtatattatataggttctgtcagaagatttacctggtatactggctaaaatatcgttcccaaagtcaatgcggtggaactcttcagtatgtaacttatatttgtatacatcttcgttcatattgcctagactctgttgtaaaacaaggggtttgaattactgctttatcttttgctgtgattaacaggtaatgtttagcaggccgattcgctgggttatggccttacatggtgatctggttgtgccattctcctttgctggcatctcaaggtacgtttacttggctactcttgcttctctatgctttatatggcttcggaaagatgttaatatgcaaaatatttgtaaataaagtaactatctgtttcatcttcaaaatgcagtggaaatgtatcttgtggacttcgcaatactgcttcagcatcactgttggtaagaatataccctgcattgtcggctgtaagcatatttggatgtcatgcttcagatgtgtgctttatggtcttctatatattggcaggtacagaatgcagaatcctatgaagatactatgaggaattctggaatcaatattgagattgaggcatgtccttcgtgcattcttctctatccattatttattaaaaaaatatttttaactttcagcagggtgtcagatttctttcaatttggatttgtagttatggatctatgtagtcatttcattggttactataatttacaggaaaggaagaaaatcattcttgagaagtcaaatgcactagcaaagagtgtgagtgggcgccttgttgttccgcagaacttacttaatgaagtaatatgttgttttttcagtgatatgctctaccaatggttccaagaaatgatattttcctcatgataccaagaagctaattaatttatggtgttttgcaggttgcaaatctcgtcgaagctcctgtgcccttaattggaaagttcaaggaatcattcttagaacttccagaggagctattaactattgtaagctcttcagaaactaagattggtttttattccgtgtaactgccgtgtaactgcccataacatctgtttactttcttatgatttgtcagcaagtatgcttatttatttaggcctaactatggtgtaaccctataggttatgcagaagcaccagaagtatttttccattattgatgagagtggacagctattgccttactttattgctgtacgaaactatagccttgcactgtcttctgctgcatattttgttttcatttttaattgcacagaaacaagtttttaatagctgataaaacatagtgtgactttgttttaggttgccaatggtgcaataaatgaggatgtggtgaagaaaggaaatgaagcagttctcaggtttttgagatgtgttataagtggctaaatctttttactcaaattgatagtagatctttcttggcacatctttattcttctagctcttttcattgccctacttatttactgtcaagtcttgatagtggtccatatttaaagcatccaaaggtcatgttttacttttgcagggcacgttatgaagatgcaaagttcttctatgaggtggacacaaggaaaagattttctgaattccgagatcagctacagggaattcttttccatgtaagttttccttcggtacatatcttaaacaagaagatacgataaatgcattactagatggtcgtacttcctttcttttttgtagtagtttcattgtggtttcagatgttcagtaatctgtactattacaagtaaaaaatgcaaaccatataatattgacttcagtagcacatacaacacaagtttctcatccatgtttatgtgaattaataggaaaagctggggacgatgctggataagatgaaccgcctcaaaaagatggtatctaaactttgtttggccctcaaaattgatgaagatctgcttccggttgtagaggatgctgcctcacttgctatgtcagatcttgcaactgctgtagttacagaatttactgcgctgtcaggaataatggctcgtcattatgctctcagagatggctattcagagcaggtagtggattgttcaagtgtgtctgtgtatggttatgagcataagttgctcttgtgtcagcttctttgcttcatagatttaagctactagcctactgtggtatatatttattacatgtgctccattattatatgacaattgtgttcctgggatgcagatagcagaagctttgctggaaattacacttcctagattttctggagacgtcatcccaaaaacagatgcaggaatggttttggcaataggtgataggtaaattgaaagcctaaagttttgttgtctctcccatttctttctacgccaaacggttcgtcctgtgaacacaaaaccttgtatctggattgcgcggagctaaattgtatatgcttctgatatgataatttttgttcgaatttgtgatcctatatactaacacctatgcttgtccctatgactgtagattggatagccttgttggtttatttgctgctggttgccagccaagttcaacaaatgacccttttggccttagaagaatatcatatggcttagtaagtttatagatattctgatctgaaaatgagctattatgatatgtcattttatggttgcatgaggttatggatgccaagtaatactttgtatgccacaggttcagattttggtcgagaaggataaaaatgtcaacttcaaacgtgttctagaacttgcagccagtgtacaaccgacgaaggttgaggcaaacactgtagaagatgtgagaatcaattgagtggcatcaaatcttgttatcaccatctgaaattgttcgtgacataattaactcttttatttgtttctaggtgtatcaatttgttactcgaagactggaacagctattggttcgtgcaacttttgtgatgtttatctttttcgatttcccagctcttaaaatatcttacgggtccagttcttgaaacaacgttttatccttttttacaggttgacaacggagtaagccctgaagtagttaggtctgtcctagcagagcgtggaaacaatccttgtctggcagcacggactgcatacaaggttagtgacttgtgatatgatccaatagcagttagctagggaattaggtaatagttgagaagcctttgggcatcattctcctagtgaatgttgctgtgtcatagtgatattgctccaaagaagctaacatcgctggtgcttgccttgcagacggaaaagctaagcaaaggtgagatgtttccgaagatagtggaagcatattctcgtcccacacgcattgtccgtgggaaagatgttggtgttggagttgaggtacttgaggtttctgtctgatcaaagagcatttgtgaaaacttgcagcttctaacattgaatgatgcaatcaggtggatgagaatgcatttgagactccccaagagagaacgttgtggagtacttacacctctatcaaagatcgaattcacactggtaactcactttcttccctgctgtattctctcaaacaagctcgcttccaaattcgtctcactaaccttccaaatttcaggcattgaaatcgaggacttcaccgagatatccatgcaattggtggagccactcgaggatttcttcaacaatgtatttgtaatggtggtaagttaaaactttgtccatacactgtactcgagtatcgcagacgagtgaagtttgaatataacggtttttgcaggaggaagaaagagtgaggaagaacagactcgctctgcttaataacattgccaatcttcccaaaggagtcattgacctctcatttttgcccggattttgatctttacttgtttcataatcccactccggaatcatcaattcattgacctctcattttttctttgtttcataacctcatatagttgtgttcactgagcaaaaattcaaactaaaacttgtgcaatggaatactttaaaaacagtttcataacctcaataaaaagatttcaaagatttttagatacttctgattgagatgtgttctatttcaaaattctttttttttttctcacaagtgatagaatttattaagctttcacaatatcatacataggctttaacaaaagcccaaacagcaggtttacagaaatagccaacaaagaccaaatagataaccgacttctgtagaagaatttcaatctaaactccatccatggaaacgtgtcgacaaccggttaaaccacgtcccacgcctgatgagtaatcacaagtttttccggcaacaacctccaccgttgagcgccgattccggtaagaaatcctcgccgataaggaatcgaacgaagactcttatgttttgcaccgaattgaaagcatcgaagctccaattaaagtaacagcttaagggaccatgataagcgacacaagaaaatcttctttccttcaacaaaagagtgaaatctctttgaaatcattctgtaaatccagagtacaaaagaaaaggatccgaaatttatcttgaagagataagaaactaattcggatcggagtaaaactcaaaggacagagacaaagaagaaccaccgtggatatggcagatcaacatccctaatcgtagatccgatgagattattagcaaattaaaaacataattgaaaaattaaagcaaaaacagaatccggccatggccgctaggttagccggtcgatgccgggcaaaagctagccaccgctacttaggaagccagtcggtgctagacgaaagccggccatcaccgttgagaaaaacggaagacgccggacatgtagccggataaccaccggacggcgagaagaagagcgtattctctctctaaaatattcagagagcgagaagagagagaaacactgacgaaaatatagattttatgggctaacaaaattcaaatgaaaacattggattataagatggttaacaaaaatggttgagaaaaaaccatcgagagaaccaaagggagagaaacggagctaagttatggaggaagaaaaagcggcagcttactacgacgagctcacgcgtaaaggagaaggagctgctcgcttcaagcaaggtctcggcttctccaccggagccaacgctgttccggagagaggatcggcgatcgcatcgtcgtcttcgtttctcaaccaattcgtcaaggcttctaaccatactaaatccactgataacaaggattccgagatccggtccatcagagataaattgaagaagaaacctgaagatcctagggtgccggagaggagctatagagagtcgagtgaacggcgtcgttatcggagtagagagagggatgagagagataaaagccatagaaggagaagcaggagttcagagagacgtagtagttatgtggatagagagagacggagaagcaggagcaggagtgcagagaggcgtaataggtacggggatagagagagccggaggaggagtaaccgaagcagaagtttgtcgccgaggagagagcggaggagcagagaagatgttaaggagaagaagcctgattactcgcggttaatcaaaggctacgatgagatggtaatactcatttctctcatcattcttcagcctgtatggttatcatacttcgaggaacttttgtttaccagaatcagcatcgtaatgttataatccctctagagttaggacttaggagtgtaataagaacttagcaattacctttacatattgcaacataggaattgccttcatgtgcccacattcaatagatgttttgagattataaacccttgatctctaatttggtttaccattcttgtggagctccttctttgtttatggatgatagtcatagattctgtaattttgttgctggtgttttgtgtgtgtctgtgtgtgattgtcatttccgtggtattataaggttggtttttgtgttgctttcttgaacagtcagctgctgaaaaagtgaaagccaagatgaagcttcagcttgatgaaacgggtatgttagtcggtcccatttgagagattacattgattctgttgtccacgcttcagagcagctaagatctcattctttcgacaacttcttttgagtgggatccatctttggaatgttagaacggtggggctgtgttttggcacttaatgtcttggccttgaattgatgatgctgataaggctttcttattagtttagtagttttgtagtgattcgtagccttaagccagttagttgaggtgctaatgttaaaatggaggtacggagaatgttaggtttttggttgggcattgggtcagcaggtagctgagaattctcccatcaatcaaagtctttatggtgtagttctgtggagggctgtgttttggctctttatctcgtggcattcaggatacaatgcacgttactgttgggagaagacttttcctaacttttccttatcagcaaagcaaaatctattgacctcatagattttcatagcagctctgtatataaggaggattgagacaaaccctttcatggagatatcaaatctgtaaatgtgtttatggtagatgaagaaaaaagtcctggtgtctgagaaagaataaaaaaacaagaaagatcaactctgtccttaaaaatgagatcccttgggttgtataccttgtgaaaacattgatatcaatctcatgtttagttcttctcttgaaattaatgatctgcttggtttgcagctgagaaagataccagtaagggtgcaggatgggaaagatttgaattcgacaaagaggccccagttgatgatgaggaactagaagaaggtcagtttcccgtgaatctctacctttactccatgatttcgatgaacggacagagctaaagccggaaatcattctcagttactctgtactcttgatgctaaaaacttcatatgattgcaggtgctgatgatgatgctgccttggtcaagcgcatgggacaaagttataggttttccgccatcgaggtttactgagtcattagcttacattgtcaacctctaatcaagtcacagtttttattatatcagagcttcagacagtttatatggtttaataaaaacttgtaaggcaaaaagggaagagcagttgaaagccgcccacgatgaggccatgtttggagtacccacaggccaaactcctaccgagaacaccggcgatgatgttacagagataactaatgtaaaggacgatgaaggagaaagcaacagtggcgcgataagtcttctaagtgaaaaggtaaaaatttgtgagctctcttcatttcttttgctctcaaaccaatcgagattcttagagctccattttagggtatgtacgtaagcttgttaatccccatactttgtgttttaggtgcttgcaaaacagcaaggatcttggcgtgacagagctcgcaagtcatgaaattcatacatatgtattggaactatggaactcgtggtggttaatctagtatatagttgacaaagttttgatcgtatgttccttgtagaaattttgatgaagtgtttgaaagtgtttgcgatccatatagattgcccatcgatggaagatataattggatcatgttttttatccagatattagtttattagtacctaaaattttcttcgaggaagtaagatatatatatgtgattacgatcttatttccaaaaatccaagtattttccataaaaacagatcaaaggtagaagcaaaatccaagatttcaaggttaaataacgagtcggatacataagatcaaatcccaaaccatgttaaagataaaagtcactcctacataaagaagaattgaaacgacgctcacttcttctcttcgttctcagcctctgaagccctcttcgctctagcacctgcatgtctcttcattgtgcgtgctacacgaagagtgttatacgcctcaaaggatttcatttcagcggtgagctttacgagctccattgttggagtctcacgaacaataggcatgtagtgcttcatctttttcacctttggaaagagaaatcatatgaggcaacaaatatctcaatgctcaagctaacatccaacaagcaaactaaataaataataataactagtatcatcatcagatcaaacgaggcaacagcttaatgctctagctaacgaccaatttgatgtagagtttacttctacaaaaacctttgttagtctctaaagcagaacaaacaaggaatcaaccaactcagaaaaactcggaatgaacaaaactacgaacttagagaattcctatccaagagctagcagaacacaaaagaatgaactaatacatgcctttatcgatacgtcttaacaaaaaactgaacctaataatataacatacttactcaagataggcaacaagaagtagagcaaatcgatcttcacaacgaacttcaagatctcaggagctagcagaaaagagaaaacacatgatcgcattaaatataaaacaatttatgatacgagatagctgcaattgaaaaagggattgtgacacgtttaggcacttttaaagaattttattccttttgaggcacttgtgagggataaggcacttttccaactttttcattaaacttttgaccaatttgcccctgaaaattaagaaattattatttaaaaaaaagtttcatctctccacattccttttttttttctttcttcttcctcgcttcttcttttcactcgctctctctcttctcattattacttttttctttccttgcaaaatcaaccatttgagagtttgtcaaaatcgtgtagcttctatatttttctctacggagaaacctttctagatttatgtgacgattgcttgttcgattgaagttctgaagttttggagcgttagcgcatgtaacgaatggcggaagctcaggttttgcaaccagtaacatctagaggtgaaaaataagaagatttgttccctcaattttacaaccaatcgatcaaggtattgctttcgccccgacgattcctcaattttgtgaacataattttaagttttgctagattatgttgtacttgtttcatattagcaaaattgtgtttgtgaagacgaagatatatgttgcagatcgaaattccctcttcccttactctcctctatttcagatcagttgcaagaagacgacgagatagacggtgatgattgggcctctttatagcccaatattaaaaactgtcccattctaataaagccttttcgtgaaagatgatgttggattcgattcaatgggcatttatatgttctcggcccgttcttatcatatcttattcctcctgtaaaactattttcaaaatttactattcggattaaagtatatcacaattccattattcgaataaggactatcaaattttatctattttttatatttttatatgtaaattttgaagaattattttatatttatatatagagtaagccatagaagttttgtaggactaatcatgggccgtgaccaaaacaaaccttcttataggcctataaatatactggactttatctgaaactaaatttaaacccaaaataaaacgatttgatgtgaataattttaaagctcaataaagaaaagatttggaatcaaaagatcataagcacgcacatactaattgctatcctactatattattttaggaagtacattttaaatgtaaccttaatttttataattaattacataataatatcattagaaaaatttaatcaaaaacaaaatcctttaatgatgtcattaaggttaccaaaattatttaactacaatattcatttcttaattatagggcttattggatctaaagacgggtcatcaaagatttcctaaactgaagcaaaatataccgaatattcaaatatctatctgttaccaaattatatacaaataagttcgtaaaataatttaatattttatatacaaaatcaattaaatcttaatcacataaaaattagcacaaaaaataaagtattcaacaattaaaaatttatcaattctctgtgatatatgagtttttatactatattcgaataaagtgtaatatatattttcaatttgtattctttaactaatttaagctaactaatatatttgttaatcttatacctatcaaaatcaactatcgtttcttatctctatagtatttttgcaagacttttttggtggatttgggtaaaagtgcattcgggtcatatggtgcattcccatattaaataaatatggtgcactcctatgttattagctaaaatgtttagattagaaatcaaagtcatatcataaataaaattaatattaataaaataaatggctttttggcaagacggatttggaggaatgggtttttggatcaacattaagaaaaagtaaaatataattaatccaccgtttcaatacgggttaaatctttaatttattattttttaagactactaatattaaacatatcaaatcatcctaatttagaaaagattatataaaaccaaaaatgttatgtggtatgtataatgttactatatataaaattaaactataaaatatatattagagaatgatacaatttacaaaacttttatatataataaataattcttaaattttaaaaattactactttaaaaaaaattcacggaacgggtaaagaaattatagaataggttttatttttggaattgagttatatggtggatgtatttgaatcaatatttataaaattctaaaatattattaatatgatgttttaataaggattaaaacttcagttttttaacaattgtcgcatagattcgtggtatagcgttacttaataacaattataaactgaaaaatttaaatattttataaaaataaaatttacaagttttaatatatattaactttaaaatataaatcgtcccgcggtataccgcggattaaaatctagtttgctataaaaaaagtaacgtaaaaattgttgccaattagatattaccaataaagaaatttaaaatatatgggttgaaaaaagagaagaagataagaatcgtatcttattacaacttgccaatttgctatcgtttcgtaacagctaaacagttcaaataaaacggtgtctcgaaacactaaatagacagatgtcaatacctcattggatttaagcataacgcctcgctgccaattagaattcagcattccaatttcattttattttctcacaaaattctccaaaaaacctaaaagtcaaataaatataaagtgaggtcttttctacgtctcttcaacattctcagagaagccgtcttcttcctccttcaatctctctcgttcgtatcatctgctctgcgatttcaatggcgagccgttggttgagacctgaggtactacttcattttgatctttgattttccctaaatcgaaatccatcggttgattctctgttgactacgtcttatttctaaatccttagatctagattcgattcttgtaagaattagcctcgtgaatcaatatgataacgtgtttcattgtttttaggtgtatcctttgttcgctgctaccggagttgccgttgggatctgtgcgttttccttgatcagaaacatcaccggaaaccctgaagtcaggtctgttgatcctcctctgattttgatttttgctacttcagacccttttacacaattgatcttatggaatcaggtttttagatcatcatctttattttttgaaatggaacaaaacaacttaaatagctagaacagagatgtttttgattctaaagtttcttgcattagggtttgttttttgattcagtgtattttaaagggtttagattttggatgcaatgtgttctctaagggtttaaacatgaatagattactgcctaacaaacattcttgactttatctatttttagagttctaaacagagatgtttggactcttgaagtttcttgccactgaaattagggtttgtttttggattcagagtgtggtttctaatgggttttgtttgttgaatcctttcttcagatgcaccaaggagaacagggctgctggaattttggataaccatgcagagggagagaagtataaggaaaatttcctgaggaagtttgttcgcaacaagaaacctgaaatcatgcctggactcaacaagttcttcactgatcctacatactgaaaccatctttgcacaccgctttgtcgtattgtttctggaattgaatctctttgtgatataaaaccgcatttgtcaatttcacattgttgatgtatcctccagctgaagacacttgttaatgctgggcttatgttgtcacttttaagcagaaaattgtatgacttgcttatggcagcatactcttttaatgaccatctcatctgagagtaataagcacttgatatcttcaaattgtcatgatttcttacattgtggtggacaagcactaattttgagccaactaagagtgaaaaacattgttccatgagaaagatcaaatcctgatgtggcctgaatccatataaaaatgcaactttgtaaacgggcatcgaaatttctgatcaaagtaaatcacaggagcatcatcttgatgaaatatataacttggtacaaaggtttatagtgtacatgatgtgagacattctctctcaaagagcttttgagtattcggaacagtacagctaaataggaaaatgctcgagatccattgaaggaaaaccggtttgcgccattctgatccctctgagtaagctctttgccttttctttttcctgaaaagatgaatgcaatctcgtcacactatctcactaagtgtaataagtgtatcaggatactcagatccttataaactagttaacaatggagaaaattggagcagaaaacttacaggtccactataatcgagaagacgggtgcaatacacttctgcttcttcgaatttcttgtgatttttaaaatgtgtggcaagaaaaaccaaagcctcaaacatgttcggtccttctaatccttcagcatccattctctctaaatccttctcgaagtaatatgcagcttcttcattacgtccaagcttctggtgaagctttgccagctgattaagtgctattccttccgtgtcagtacagttcacagctcttttgtaacacttgatggcctcttcaagcatgtaaagctgttcggtttgataacatttagccatggctatccacaaccgagaatcatttggaagaaagaatatggatttgcgaaaatagtgaagtgcatagaaaggcatccccatcatctcatatgcttgtcctaacccataccaagctcgataatcagtagggtttatatcaacagctcgtcgatatgcatcaatggcagcaggcgtgttcttcatctcaacatattcatggcccataagagtccacgcagataaatacttcttgttcagtttcaaagctctccggaaatacataactgctttctcatgctggccttttaaactgtagtagttgccaatgatgcagcaagactcaggtctgtacttatcagtcaaaaacaccttatgtgcaaggtaactcagcgcagcacatgcttcttttgcatacagaacattagaatacaaatccatatcttctacccgatatggatcgtttctcagaagttcttcaaacatgatttcaacctggtcgaattccctaagactatactgagcttttgcagtttgagcttggatgtaattgctaaaactgaaaataccttgcaaatactcgtacttcgccaaagactcggtgtgcattctgagttcttgataagcattgccaagaaaaaactctttcatccagtgattgtttaagttaaggctattcaagatttcgatcgaagtacacagagactgcagctctgaccaggcactccagttccaaggataactgttgacagactccacaaggctggcacgtgcaagactttcatttcccttttctttaagaaccacaccatacaagtataatccaaaagagtcaattgctcctgtcctcctcagagctgataaatccctctccaaagataccagttcacggtttatggcatcactcttacccaaagggccttcaagttctatcatttcttcctctttccgtttttctccagccttcattgaaacgataacaaagttaatgacatattatagagaactatctcttttggtgtaaataagcgggagtaaaaaacaagctctcagtaagtaattgccataaacgtttacagaatagtctttaaacaggacgaacaattccaattaagtttcactcatttatttacttttgtatatcagttgcataccctcatatctcttgtatcatagaacataactgtgactggacatcaacaaaattgtgaatcagaggctcagtcctataagtttgtaataacgtccatatattgcatttatttgaaggcagcctactggccgaggctaaaagaacactcaaaagcattttggagccaacttttaaaaagttcattccatcaccctattctgataagatataaaagctctagctaaatagaaaataggagatagagaaacagaacataccagataaagcgcatagtaacgcaagaacagtgatttcttgctcacttggtcacgaagcatatgggaggcccgtctatactctcgacaatcaaaataggactttgctaaaaggtaaatgtcaccatcaatcgcttcatcttcttccgggagaggagtagctgcttgagagaagccaacggaaggtaacggtgttgaaatagattcattggtgctgaaccttctccggatgctagagcttcctcgctgaaacctcgtattcgcaggtgtaaaattagacgggtcttgctctatccccacaagctgctctcctgccctgcaatgatgaaagcaaaggagatatcaaatatggaactgactaatagttcaccaccattgaactacaatacgagtactaaaaactgaaactttaactcataattcacaaattagtgtcgagctcaaacatatcgaaagattgaaccggagatcagaagttcccatcgaaagaacacattttttcaattagtgtcgagctcaaacatatcataacacaaaacccacatgtcgaatcatctgaattggaatgtatccaacaccaaattcgcaacaaaagtgaattcgaatcaacgaatctgcttaaccaaatttgtttacaattagcccaggatacaaaaaaattagtaaaacccataaaggatagtgaaaaaatcgatttttaatcgaaccagagcagtagcgagctagagattgcaacaatgggagaggttgaataagattagggttttgagaaaacgaaccactttgcggcggagtataaacagcggtcgctaagctgtcgaatagccgcacgtatttcgtttcggcaacactctttagagaccatagcagaagcagaaactgagagtttaactttaagtattcaaaaaagaatcgaagaatctcttcttcgtcgtggagagagatttcagaaacatttgctccctccatcttaattattttgaaatttacagagagatcgtgtgtattgggcccattgattaacttttgggtttcaaaataggcccatgaaactaacatacacacacacacaaaaactctttacacaactaattttaatatcatatcaattttgtcactttgtattaatttctgttaggtatcaatgaattattgaaaaagtgtaaaaataaaataagaatgcaatttttttttttttgttttgtcaacaactttaaattaattggtttagctcaaatgagtaagaccaaaggtatgcaaaactattatagaaaaaaaaatcttagttggacaaaataaccttttgttttggtcaatagaaatttttaatggtaagactataatttagtcaaagatagaccctgattttgcttatgcaagtagttaaacactatcatgaatctaccattttaagggcattactctttacaagattacaaatcaaaagatttaatctttccaaaaccaaacaaaccataccaaaccaaaaacaaattcagaccaaatcacttttaaatcctacaaaaccaaaatccccttacaactttactttttgagttcaagtaaaaagatagatatccaaaatagatcttgttactataatattgattgaaaatgtattattttggttaatgtaatctaattttggaaaagaaaaatgaaaaagttgaacagaatcctgaaaatattgtaagaaattttctaaaccgaaaaaacaaaaagacaaaaaccaaaaaattgcgatctgaaccgagcacaaaaccgtaaaggtttcagctttaccaaaatttagaggagtgtgtaaatgttacggagaaggaggagccaaaaaattcaaattggcgctcaagtatcttgggaaattccccctctctctttttaggaaatccctccaaaatacaatatcaaattctcaatcgcagacatcgtttgcgtcaaccatgtcagatctatcgccagaaagattcaaacttgccgttacttctccttcttccataccggaatcttcttcggctttacaattacaccattcctatagtcgcaaacagaaatctctcggacttctttgtaccaagttagtgcctttttactaaacccattttatttatttgttgttgaatttgttctgattagtgttcttcgtaaactcagtttcttagctttgtataatcgagaagggattgaaatggttgggcttgatgatgctgcctcgaaattaggtattgcccactttgtgtttgtgatttttattttcatttctgattttacatcttaatttgttgattggggtttttggggtttatttcaggagtggagagacgaagaatctatgatattgttaatgttctggagagtgttggggtgagacttgtttctccactactttgttttttttcagaatccagaagtgttatgtttgcttaattcgagttttgtctaatttaggttttaacaagaagagcaaagaatcagtatacgtggaaagggttttccgcaattccaggagcattgaaggagctacaagtgagtcttttcatttgttttgtattcggattcaatcccattcaatcccaattgtgaagaaatgtagcgatttgatttgcatattctcataggaagtgttcttgatgtaggaagagggggttaaggacacttttcatcgtttctatgtcaatgagaatgttaaagtaagtcatttggatttggtttcttttgatatacttgtgtctttagtttgttgtcttcatacttctaatgcttaaagtttcatactttcagggatctgatgatgaggatgatgatgaagagtcttctcagcctcactctagtagccagactgatagttcaaaacctggttctcttccccaatcttcagatccctccaaaataggtactgtttcattttgtgcgtgtagtacttattgtgttcgggtttagtgccattgcaaagtagttaagtgatttaccctcttggtaactctatatgtgggatatgaattatgagatgcaatgtagatatcctaacattttgttggttggttatgtatgacagataaccgacgagagaaatctttaggattgcttactcagaactttatcaaactctttatttgctctgaagtaagtgagaagttcaaagattcgttttttgaactaaagagttattcactaagttactaaagatttgttttttatgtgttcaactgtttaggctattaggatcatctcccttgatgacgctgcaaaattactgcttggtgatgcccacaatacatcaataatgcgaagtaattatcttcgtcttgtgacctgaaaagtcttttcttttatgttaacatcctcggttgagacaaatcgatctgtgtttgttgacacattgattacttttatgcagctaaagtgaggcggctttatgatatagcaaatgtcttgtcgtcaatgaatctcatagagaaggtaagtcaaagttatcaatagctacaacagttgtgaaccatctatgatttcaagctgtgatttaagtcttactagtttctgtattctctggtggcagactcacaccttagattctaggaaaccagctttcaagtggttagggtacaatggtgagcctactttcacactgagcagcgatttgttgcaattggagtcaagaaaaagagctttcggaactgatattacaaacgtcaatgttaagagaagcaaatcatcatcttcgtcccaagaaaacgctacagagagaaggctaaagatgaaaaagcactcaacaccagagagttcttataacaaaagctttgatgttcatgaatcaagacatggatcaagaggaggttaccattttggaccttttgcaccaggcactggtacatatccaactgctggtttagaggataactctaggagagcttttgatgttgagaatctggattctgattaccgtccctcttaccaaaaccaaggtgcatatattttattcacatccatttgatatcaaacttgtcaaaatattgctatgaaattaactctgtttctgaacaaatttcagttttgaaagacctcttttcccattacatggatgcttggaagacatggttcagcgaagtcacccaggagaatccattacctaatacatcacaacaccgttagatcttctttttcttcttcttcttcttcttcttcttcttcttcttcttcttctcttacctgtgaacatcaatcatcattcgtgtagagagcttcaagagtcatttcttttgatcaatgtggtttagtttctccacacaattgtaactgcaagaatccgacattaattcacagatcgcataccctctttgctttctgaagtttactgtaggctgtaacttttgtatgttacatataagagcattcatctttcgccagttttttgctacttttgtatggcatgttgttttgagaaaaacaaaaagaaatatcatctcatcttatttttcatttttttcaagaatttaaagtagcaataccatttctcttacagaagggtctcttgctttattggtatattctcatgagtacatgttttaaggaaatatcaggaactagtgtttgtctcagagcttggaaggaggtttgtaccatccccatggttcatcagagatatactgagtcacctgcttcacactcaagtagttctcaagtcccctgcgacgaagaaaatatgtttcaattcaaattttgttggtaatctattacggtttaagttactatggacacaattccatctagttggagagtgtctttttctaatggtttgataatcttaatacttatagctaacgaaagagactaaccattctcccaattcacggccaaatccactgcgtttggttccaccccatggagcttggcagaagcatggctgagagcagttgacccacactattcccgcctggaaagcctgaaacacacaatgattacgattcataaaactttagagattaagttcaatcatgaggttattgattgttattgttgatagtaaaagttagatacacaccttactaacacgatcacaccgctccagatcatttgataatactgcgcctgctaatccatatctgcaaatacaaataaagtcaggcatatgatctaacacgtcatcagtggagttctacttcaagataagaagagaaatctacactcactgagagtcatttgcaagctgaattgcctcatcctcggtggagaatgttttcacacacagagcaggaccaaagacttcctctctccagatttccattgaagtagtcacatttgaaacaatcgcaggttcaacaaagtatcccttctttaaatgctgcagaacataaataaaatattgtaagtgctacgggctctagatagtatttggcacatacatagaagattagtcaatataatgtacctcaggacgaactcctccacaaagaacagttgcaccttcattcctagcgtttgagacaaactttagaactctctcgtactgcacaggaggataaatatgtaagacttgactagaaatctttcgtcattaacccaaattgatagataagagggttttggaggattgaggtgtttattcttgagaatgtcaattctgtttagcaatttaacctgtcctttactgacaacaggaccaagcctacagccttcttcaaaaggatctgaaatcttaatgttcttggtccactttaccagcttgtccaaaaactcgtcagcaatcctttcctgacatttcaccagattctttcatgaaaacaacagtacacaagaagtatagtaaagcttcgctatcctacttttatcaagggttcccaaggtcctacgacaactgatacttatcaatctatccgaattgctgatgaccagtcttacagataaacatatactgaaactctgtacctttgcatcggtggtttcatgtaaaagataagttatatattctacttgttttatgactagagtagcctacataattataacttaatttccaaaggtaacctttaattttacaacatataattgtgttaacggataacacataacttgttttatatgtgttaacggataacacataacttgttttatatgtgttaacggataacacatatcatgaacagttcggtgcagaatttaaaatcagaggtactgtagattataggctcacttacatgcacaagaagtcgagatgtggcactacaaatctgcccattcgtccagaaacaaccaaacatagtccattccacagctgtttagagcaaaatattagtcacaaattaaaccagcattttagaatacaaatatatagcatagttttcttaaggttccaaaagtacccacctttatcaatatcgacatcatcaaagacaatgatagggcttttacccccaagctccaaggaaactggctgtggaatgaaacataaaacaagattcatgtacagaccccgaaaaatcataggtcgaataaacaagccaagataactactagttccaaaggagagtaacaaggacacttagacttactttcaccaatttggcagcggaagtcataatgctgcttccagttgttgtgcttccagtgaatacaatctggtaaaggctaaaatatcaatacttcaactaacccataaaaaggaaataagtgctctatctataagtgtttgactttcaggacactggtagtggtatacaagtgatcagaccttgtcaacatgtggatgcgatgccagtggagcacctgcttcagttcctaaaccagtcagaatattaagaacaccaggtggtagacccacctcgcggcaaatatcagcgagctccaaacatgtcctggaataaaacagcatcagattggcgagttaatgaactaatagttgaagtggctagctatgatgtcaacagaaatcaaaaactcacagggaggccaactctgaaggtttcagtatagccgtgcacccagcagcaagtgaaggagcgactttccagacagccatcaataacggatagttccttgaatgcaaatatagattattagctgcctaataacatacggtttgtctaaaaaggaagatagaacacttgaagaccaatgtgatctgaatatgtaaaatttaaatccgcgaacttgacaaaggataatacacaacgatctgagggatcggttagattcaaatctgtcaatgaaatatagtaccatggagtaatcatgccaactacgccaatgggttccttgagaatataacccttaaaagtatccatcggaagagaaagaggagtcttctgctttgcatccaagccttcagctaggtcagcataatattcaaaacatccagcaacatcatcctgcaaaggttacaagcaaccacatgtgacatatgaatcacaaaactgccaaatgttcacaaaagcaaattgagaataccatgtcccatgctgcttcatctagaggtttaccgcaatcaatagcctcaagattagctagttcagacttcctctctattacctggatatttccattatgttattgccaggcaaaacagctaacagagaatgaaacatgagaggaacatagatttgattaactcattgttgttaccttagctgcaatagcgcgcaagtatttggcacgaacagcaccagttgctctagcccaatcctttccgttgttcctagtaaatgctttcctagcagcttccacagcaagctccacatcttcagaagttgcagctggaatataacctaaaaccaccaccaatcccagtttaaaaaacactacaaagaactccatcagcaggagaagagatccaatccaatcattcaactacatatctatctattctcctcctatataatcccacagatctaacgcaaaaacaacttccgctcccgttcatagacaataatcacagaagaaatgacgatcgtctcaaacagacaaaagttcaaagctctttcaattcgcgaactaagtatacagcaaatcgggaaatgcgtagttccgataacgatagattgaatcgaaactcgcgaaaatcgagtgatcaagttcaaaaagtgagtaacacaagatatgattggaaaaaataaaaagtaccgatgatgtcttcggtggcgggattgacaacagggagagttttacggagaacgggctcagtccattgaccgccgatgaagagttgccgtctcggcaccgtaatcgccatactctctctctctctctgctactagaggtggtgaaaaggagtaaaatgggatcgttgggactttccgttttggttctaagaatgatatctgacccatttttctgatagctgctcatataaaatagttttttaccttttaaaaaataagattgatttaattcatggatatttacatttatttggatttctaaccatttttacatcatttttttatatacatcctatacgaggctgtcttttttttctttcttgtaaaaattgtttaatcaaaagggacattcaacaaaattgcagatttttagctaaaccggttttaaacttaaagagtcatcaagaatctagactcgattccaattcttcatcacagtttaatattccgcacaagatcaaactatccagattcttttttttgagtttttcaacttttgattcgaactatataaaatgattagtaaaattattcacaaaccaaacgattcaccccatttccacggaacaataaaaagatcaaaccaagccaaatcatctttttcaaaagtctttaatatctccgatcattatgaatatagcaagaatcaaaacagatttttatcgtttacaaaaagaagaagaagacgaatatgtaaatccaaaaaaacaaagatatgatgagtcaattcttagtggtggtcttgttgtacttgtctttaacccaattaagacccaacgatgttcctatcttcaccttctttaaccccgaactcgccgccgctttcgtcttccctaatccagcccccactttctctttgtatttagacgatgcaccaccaccttctccgccgtgagttgtttttcccgacgattgttgattgctgtcccactgctcggcccaagagtttctctccatattgtatgagaacgagaaagatttgattaggtgagaaaaaatgtattaattcaatcaaatcgtgattaatataagaaagtcacgcaacttattatagggtttggtggggtagattagagtagattatgtattatttaattaatttatacaaaataaaaggtattattttgattatttgactacgttcataaaatggtgtggtggtaaattaatgataaaatagattaggtagatatttgtgttatgtttattctggattgcgtgtttgtgtgtcattatttttcctaattctcactacgaaatagtcgtttttgatacattaggtatttaattaatacaaatcttgtgcttatcttttgatcttttgactttgtgagtctattcctctttaattttgacttcttctccaaatgcagtaatatttcttctacgaatttgtttcctgattagcaaaaacccaactttcttcttaggaacttgggtaaaaactgtctgtgggccttatcaaaaagcccatattgggtcaataattatgactttgtcacatatttgaccccgttcattttgatagtttataattacatcaatggatagttttgttaatcatgcaagcctgatctctagtttggttcaaaatcttgttggagtatttttgtagaacaataatttcaagcattcatcaatcaatatgtgtttaacgaagctaaatctattcaattacaaaaaattaaaagcgaacacatgttacatctagattattgttattcaagtaataaaaattaaaaggtaaaagatagatcaccgtaaaaagtttcttaagtatagactgtatatatagtttataaacataattaggtagatatatcgagtaaaaataagtaggttaatgtaaagtacatggtatatttaatagttatgcgacgacatttcatgcgcttgactgcttgtgcaatatgaaaagatttcactgttaaagttttagatttttgttagttaattatttggcgagacaggtcaaattaactggtattgacatttaacaacttttagtcactcttttaaaaggtactattgtctagaacaacttttctagtcactcttttaaggtactattatatacacatatgatcgataaccagtcattttaatcgtccaaacctcaaaaatgctaacttcatagtcaatacctaaccttttttttcaaaatctgattctcttaaatcggaacccaaaatgaaaccttatggcctattaaacaagaacaaacatgtctatatgatgaattgattttccctgaagcaagctgattcttcaagcaaaacaacaagggagctcacaagtttgccaattgccattacatacaggataaacggaataattttgtcgttaaaatatatactgaattgttttcaatgacatgcattaggtaggtagtgtttgttgaaatggggacaaatcaatgaaacaattacaacaaaattaggttaattcaaaaggtgtgtgtgtgtgtagttttttttttttttttttgtatacaaaaactaattagcaattgttaaatatgcattgctctaaatatgaattcgagcatcacattttttgtatgttgtgtaagtgttaatagagagatcaaggacaaaaaaaaaaaaaaaatgttatattcgctttgatgcagagacaaaaccgacaaaaacacagaacaataaatgatgtctcgaaaaaatttacagttgcttcaaatatcgaacgcaaaaactatttgtaaatgcatttatgttcgtacacatttcttcgtcaaagacatcataactttttggactgtaccaattgacacaatcatttgtatataaggaatgaatgatctactataagtctataatctatatagatctacatatatatacgctatgtaaatatacacatataacatgaacatatgctttatattcatttcatgaaacatccatcatggttatcgtgtttacacgcatcgtttactagtgacggaaattccacgaactaattcagcataatgaatcattgtttgtatatttagtatatactataaagtgtaccttgaaaagaaaaaaagtgttacctagcttgtgttacactttcatcgatccaagaaataacatgataatatcttccaaaataaataaccattgtaaatgccaaatgggatataaattcttgagtagaattcggaagaacatagggatatatagtgatcatacatgtagattcataagtctaaatcagtcagaccaaaacaccgatcggaaaaaggagatattcggaagaagaaaaaaagaagcaaatagaaatacaaagggtagtcaaaagaaaaagaaacacaaaaagaaaagaaagagtaaaaacacacacacttgatttggtaattttcaagatgaagatcgctttgatgcagcgaaggatcggaccgagacgcttgattccccttttggatctcgtacgcacacgtggatgaagatacaaacatatgatgatgttgatgatgatgatcaagaaccgatctaaatgaaaaagtagagagagataaggtaaaccctaatcttaaaatcttgatgatgataagaatcaactacttcatcttctttttcttgggattcttgatctttggtttgtgtgttgatgtcttcttcttgggtattgggacttggtaggtgcagagaaagaagaaggagaagaagacgacgaagatgaacatgaatgatcatcataactatcatcatgatgatattgggaactaaagtgaaggtagagagagagagaagtgaggttgtaatgatgatgagggatgaagagaagtcagaggtaggggaggaaaattatcattactactttgaacaaaatgttttctagctcctctttttttttgtgggcttctaaatatcctagccctatcttatgcccttgagcctttctctctctaaatttctgaggagagagatagagagacagaaatgcctttgtggtataggggtaaaacttttttcaattgcctatccaatgttccaagaggaaaaagtaaaagaaaattatatatctaattttatttctttttacagacagtattctctaacattttttggatctattcaatacatatatttatttattatatattttgattaatttcatgcaaaaaaaaagaaaagaatcaaagtcatgaacaatagcacatcaaagaaagaaggttttatatattctgttatttcaaaaattcatcaacttttatgtgaacaaatcattttgtttgccatattacgatttgcatccttggtataattaacttgatttaaaaaaaaaaaatactaataatgaacttgattttcaccaccaaatcaaacctttttgaatctttatgattttaagaattccatgtgagtcgtccagggatagggaataggttcaaatcccaatatttacataactccaatcggctctccacttgaccagtctttgtggcctaaataacaaaataccgggcttattacacacttcatggaacaatttagatcttagtctaaaatctatcctagttataaaataaaaataccttaactaacaaaatcgtattattacccctttttgactttttttttttgttaaaggatctacaaaatcatattaccataaatacaagtctgaaaaatatctttacagttattttttgatgttatggatcttctaaaatttttactcgaaagtaacacaaatccttcagtctccattgtattcgagcttgtggcaaaagagatatactacttaattactttacttattgtttgtttggttcactatgaaggagtcaagcagagcatgcatagtttagtcttaatacctttcccaaaatctacatacaactcaacattgtattttgttttcttccaaattgatgttattttttttaacgtaatctatgtttgttcatatagtccaatcaccaatgtactgtgtctgtatgttatttttactaagttcatttaattttaaaagtaacgaaaaaagttaaaggatggatcaaactttttgatcgatcgggcttattctaaaagcacatggatattctttccatatgcaaaacattatgtcgaatgcccattaaccaactttttcagttcaatcttagtgctttattatccaactttgaattgattaatatccacagtattctaagttaaaggtttttctttccaccaaacttgacatgtcgatagaattgttaagttgtaattacaaatgagctaaattgctttgcctctattttggagaaaaaaatggaggcataagttggagatggtaaacaagatttagcaagttgtatatactctaatctataaaactttatcattccctattaaaagaaaatgaagaaataccacattgtagtattttactgatcctattcctaccctaactctcacgatttatatttattaaatttattttgtcttgctagtcaactgaatttactgacgaaagaaaaaggctgtttgtgactgtatttgggagagtaaataaattgctactaataaacataagctttattgggtttagttaaagaggagaattttggcagtccatgtcctgtatatatccatttttaatactaatattatcaaatttaaaatttaaagtgaagggaagagtcagaggacaataaaaaataagtaaacgacagaggaatcaaaatcatgaaactcaggaaaggcagtgccttgaaaccagagaggtagagagaatgagtttttttttccccctgtaaaagcaacctcaaatgtaaaaacataccttatacaagtatattaatcaagaaaaaaacaattgagaaggagaataaaaaggaaagaaccaacttgataaagcaaggaggcttcttgaagttgggaattttcccctcaaaagtgctaaaatgtcagcgttcttattaaacaaagtttagtgattattttataaacacttttaattttacaatttgttgtatgcgcatgataaagttctatttacaataatgaaacaagaaaattgtagtaacttttattatcggtgtaacattagtttttagtatatattttacaatttatttttcttatataaatacttgcattgtagtctgaataattgattttaaataactaatatattttttaaagttgacacaagaagaaatttgaaattttagaagtaaaaaattgtggacacattcccataatttcctgagtgactatatagtaagttataaactgtacttatgtgcaatcataaaaaaaaaaaaacaatttcaggctttaaaagaaaaacagtttcaggcttcatagtatactatgagtaaatactaaatagtaaatagagaagagtgtcttaaactctcaatgaatgaagcaaaaatgaagcaaaattgttttaaaaaaaaaaaactttttccgctctcccagagagtttcactcaccatgatgggctaaagagacttatcatgggctagggaaaatggtcaaatacagtgggcttacttagcccaacgatactcgtcggtaaagtttcgtagtgcttaaaagtttcaatgaggcaactcgactaaaaatgggccgaactgagaagtacaaaattaacaaatgacatttacaaattaatatttttaaacacttaaaataaaaattattaatttggcatattcttctagtaagaaatagtttatgtcaaaaaaaaaaattatgtgatgtgaacaaaaataatgataatgaattatgtgttacaaaaacaaaagaacataaaaatgtgagtttattacttttaaaatttaaatagaaatacatttttagtcaaacttatctttaaaaatcttaattataattgataacacttttactgatacaaaatgattttactaaaatttgacctgcaataattatgtcaccatactatatgtatattgaaaataaagtaattaatttgattagttttttgtattaattaataatatataaaaaaataaataattagactttatgctctctttctttccctttacaaccacatactattaattagaaaattatttcttaattggcaacccaatatagatgtagatataatttccaaagaaaacctcatagattcaagtttaaaattcactttagtgctatctttctcatttgatttattttaaaaagctaaaatgaattaatgaaaggaacagataccgtctttaatggaggagaactggagaagaatccaatctaaaatacatcctcgtgtttaagcggtgagactttttcggtttgctgttaaattacggttttggtatcaaaacatttccggtttaagctgtatagctctgactctgcagaaaagtactttacgccaaagagatgaacaagagtagtaagtagtaatacgtagaaaagaatctctcaccgacgacaccgaagacgaagaagaccgtacagtacatttcttacacttgtctttctttctaaacacctcacttactctcactctcacacaatatctgttgcgcttctacaggaaaatcactcacattgcgaggaaaaaagattatttgactcaaggaaacaaaagataattcggaaatttcttttgttttcctctcaggtaaattttgttgtttgttaatttcttttccttggaaaaaaatttgttttttattttttgatcaatgattcgatttttcttgaaaagatttgattttgttgatgatttggtaatcaaatatgagtaatatggagtcttgatgcagaaagatgatttcttttttggctttttttggggtgcagtgatgaaattacaaaacccagataagaaaaccctaagagaaggctttagtcaggaatctagtgtagtggctttagattctggagttttagctatgagtggtttgaaatgcgatgggaaattcccggtcaaggatgtattaatggaagaaggtggtgataaagtgaggaagattcaagtttctgggggaaatatatcacttgttgttgattttagtggagctaggactagttctaacaatttctttgagtctaatgctagttgtgtcaatgagaatctggttaaaggaaatgggtacagagaagatgaaactcaggagtttcttgttggtaatcttgtgtgggtgatgactaaatacaagaagtggtggccaggagaagtggttgattttaaagctgatgcaaaggagagttttatggttaggtctattggtcagagccatcttgtttcgtggttcgcttcttcgaagttgaaacctttcaaggagagctttgagcaggtgttgaatcaaagaaacgataacgggtttttcgatgcgttacagaaagctatgtccttgttgagcaactcgttgaaacttgatatgacttgttcttgcattgctgatgggaatggaattgtgtcagcccaaaatataacaactcggaagaacaagcctttgatactgcgtgaattctcagtagatcggttggaaccaaaagagttcgtcactcagctgaagaatattgcgaaatgtgttttgaatgctggggtactcgagtcgacagttatgcagagtcagttatcagctttttatactctctttgggcataagcagataccaatggcccaactacacgaaaatgagggtaggaaaagtttcactgcgaagatgagtgacagtaagttcattggttctccatccatttgtgcaggtaatagcaggaagaggtttcggaaagaatggtttaggaaatttgtaagtgaggttgataatgtatctgcgagagacgatctagtaaatgtgcctccttctgatttgatatctaaactcaagctgcttgctgtgggctacaattgttcggaagagactgaaaatattgggctctttgagtggttcttctccaaattcagaatttctgtgtatcatgatgaaaatgcttacaagatgcagttggctaacatggctggtttcaaggatttgatgttagcaacaaatgcaaatcgtggtactgttcagaaaaccttaaagtcaaagaaaatagggaagtcaaagatggagcctctcaatggtgtttcagttgctgatactgagcagaagacctttgagttgcagatatcaaagaagtccaacatcgaatctcttaatggtgtttcagttgctgatactgagcagaagacctttgagttgcagatattagagaagtccaacatcgaatctcttaatggtgtttcaactccaaatattgaccacgaggcctccaagtcaaataattcagggaagacaaagatcaatcatatcattggtcactcaaattttcctagttctgttgcaaaggtgcagttggcgaaagattttcaagacaaactgttggtacaagctccagacaggaaagctatgacggcagatacactcagcagacctgctgctatacttgtaccggacctgaacagcggaggcaatgctttgggtactgcagagtttgaccatatgcaaagacctgagactttaattcagcataatgtctgcccacaagaggagaagacaccaagatctacgatacttaactttcaggtgacagctcatcagggagtctcaggaactcagtttgtttctagccagccaacttcatacaaacacttcacgagtgcagaccttttcacttattcagggaagaaaaagagaggaaggaagaggaagaatgcagaagagcttccaatagttgcacatgccagtgccactactgggatacctgacttaaatggaacaaatacagagccaactttggttctgcctcaagttgagcctactcagcgcagaagacgtcggaagaaagaggagtcacctaatggattaaccagaggaatcacaattctcttcttgaaattttcctcccaagtgtcaatgccttcaagggacgacctaacctcgacattctctgcgtttggcccgttggattcttcagaaacacacgtttcagaagaatttagtggtgcacaggtcgcctttgtgagtagtgcagacgcgatagaagcagttaaaagcttagagaaagctaacccatttggtgaaaccttagtgaatttccggttacagcagaaactgataaccgttcaaaggaacattgccccacgaatgccggtaatctcacatgttagtccagttccgaaaccgaacaatataccaacaagtatggatgcaatgaggcagaatctgttgatgatgacagcaatgctggagaaatccggggatagtttatcaagagagacaaaggcaaaactgaaaagcgagatcacggggcttctggaaaaggttagttctataccgagctcttcttcttcctgaacaatccctaacatacatctatgcggatcatctcaggctttctaatggaccatatgttgtaacttatgtatcccatcttatgaattgggttcttctgttttcagtctttagtttgacggtagttctagtataagattagataatagaagatgtcggcaatattctaataacatcttcacctttttccttgatatctcgaagctctctagtttataatctccacccttcatgggagttcttgcctagttgaatatttccagcaagatcggaagtatttcctttgtacatataaatgtttactttgtgtttcccttgatctctctttagaatatgttccatattgagagaaactgaaaagcttgagatcttctgtttcttgttcacttcttaatcaaatcaaaaccatgttggtgtctatactccaagatagagtaattacaattgtattcagatagaactacaaagtagaaatcaacaccaagaagcaacctcaatcgcacggacgcagtcccttaatctagatttctcttggaggtgcctttattagcttctttcacacacttctggaggcgaaagagacagcgaaactcattcattagctcgagttgtccatctgtattgatttctctaccactgagcttctaaacaatataaaagatcacaactcaacaatgtaagatggcgttgtttaagagtctcagttttcacaagtttgaactctttgctcttttccacaaaaatgggaaaatgtagaggagacgagaaggaaagaaaccgattcacctaaaaaatgacatttcgtgtctgaccggtttagctccttcttcaaccacataaccggaaaatataacggttcgatttggggaaatgagtgaaattgtaaattggccttagtcataatttggttcgattggagtataatcacgagaaccggagacttaacggttcgactggggcaaatcgtttgagtggtaaaatgtagggatttatatgtaatttaggtcaaattgtggtgagtccataacataatctaatggttcgtttggggcaaatttgtgaaagttaaaacaatataagggcctatatagacggtgacataccacagtcccgtcagtgtcaattaaaaaaaaccctgaacccattcctcagaaattcaaaatcaatttcatcgggtgacacttggggtactttgaactcccccactcactaccattgtcgtgattctcggattatgctctagtttgatttcgccatggttgcttcgagggatgtccatgagatcgtctccaagctctcgtcagataaagccaagactcgcgaagtaaactttttagttatcccttttaatcgttttttggggtttatggggaaaacggctgagaaatttcgactttggtgtatatttgtggcgtgttgtcttgatttcgttgtgcgtagtcgcaacgatgctttattgtttccttatactgcaatacggctcggtttctgtgataatttcgagtgggtttggtttgaaaaatgttgagatacttattgattaagctatgaccaattgaccagggcccccaagcattgactagaatttgtatctttctctgagtaatgtgctactaggttttttatgttgatctatatataattccattttaatgtttctcatgttgatgaatttcttacatattctgtatgtccaggatggtgtcaagttattgaatacatggctcgaaggggaaaggtcaattaccttttgtagatttctttcgcaaaacactgctaagctaaagttggacgagattccaaatggtaggtggtgataatttattcagttgatgctaatatacagtgcatcacgctttaaagttaatctagaacgttacttctccttgcagctgaaacgtggccctttttggttaaacttctccttcaatgtgtctcaatggaggtgtcaggtagtaagcgacggatgcccaagccaacttttgcaaagacacttcgcgttgtcgttcagcgaacagaagaaactaaatttcctggtgagaaatatttttttggtgaactagaaacatggtaacatgcttttaaatttttcatggaatcactttgtgcttgtaaagacgcttcactcgaagaggcagaagtatcaagtctcttggtcagaaacttcgtaatctgattttgaatgtttcctgtagttactatgtgttaacgtcacctcaaaagaggacattgttggaaaaaagttttatggaactggaataaatttgattttcatctcacagaaatgtatctttttgcttacactttgatggtgcatttactctgataaaaaagttcagcttttcccgtggttatgtaaccactctgttttaattctcaggtgtacaatttcctttgctatctatggctaaaaccctttttactcatgtacatgatatcttgagcaacacaccaagctttcagtcagagtatggtaccatactccgccatcttttggaaattaaggagtaccgttttcaaatgaggaagcgtacatattccagtgagttctcttcaattctatatccattaattgtcttgtcttgtcatgaatctgaagcgtatggtggtatgctggtgctgtgtattattttaatataatgtttctgcaaggtttggtgctgctatacatggaaagggctgagacagggttttgcgagaaaaacagtggtcaacatagccagaaggaggaagcttttcgctatattcttacgcttcagtcacttctagagaactcccctggtgattttcctgatgaccttcgagaagaaattgtgaacggcctcattcacatcttctcttctgtaaggtctgattttatttgttagtcagtctcactcagatctgtaccctcctttgcaaataatactaaaatttggtgtactaataatacttccagagatgaggggaagctttcacgcaagcttattgaatgtgtaaatacgttcttgctgaaggatggtcctaatttaggctctttgtcattggaaattcataatgcggttgaacaatttgtgttccgttgctggttaacaacccatgataaaaacctcaaggtttatttttttctttttctttttatggtagccctttgttaaacatgtaattttttaaatataattctttttcatggtcttaagttttttcttcttcttcttcttgttctgccttgtaggagatacttgtttcttatggaaggctacagttaaatttgacaagggattctagtgaatctagttctctagtggaacaacttttggacgtggttactcgtgaattggatcttggtagttcatcaagttctgcatcatggtacatcttttttgagtctcctctttcgagggataacttctttaaattctacacatctcgtgcagttatagatttctaattgaaaaaattatttaggggtgatacaacaaaggatgaaaagttaggggcactgagcagctatcagaatagcttggttgagctggctgcacatgtgttctaccgggtacctattttatatgcaaattactttgctctttgagtagctttacatggctcacaacatagttccaactcaggcgaccattttttatctattttcagcagtgtctagattttgtttaatctaacttcacccccattttaattgattcgagttatgatttctgaagcatttttgctctgcagaagtttgatctgtatactttgagaatattttttcaacacagtcaattgaacctcatcatagacatgcatgtttgctcacagccttctgtgtcctgaaatatgtgttttgtccgcttgtgtgtatatagggaatgtgttagagaaattttgctgacatttagaactttgacaggcatgtgtcaatacatctagaccatcactgtcagagaaacgagctcgtaggcaacatattgcgatgcgtatggtggatgcactaactgaaggaaaatggctatggtatgaattcctaatcagaatattacaagtgaatatccaatctgctgatgtcttctttgcgagagttgttttgtagatatatgtgtatccatatcataagaatgcatttgacgagtgtacactgtttgtttttgttaatgacacataatgctggagaataagtttggcgagaatagcacatccctttctaagaaaatctgtattatttctgtcagtctagatgctgtcttcgcactaattctaatatcgctgttccctgttttccgtagaatttttatttatatatgaatatgtggactgaagtacataagcttttcccaggtgtgctgcttttggttgtttagttcggaattattgtgctcgcatcaatatggatctccttatttactggtttgaagccatctgcacaaactttcagaggtaatttgggaacttagacttggatattacatggatctcgtttcttttcctctaagagaacagtagctaagttcttagaagtgtttttgtcaacaaggagtattgattttgcaccttctggtatggtgctcttttagaatgtccattgtaccaaaacctaagaagcagttgataggaccatacatttaaactaagtaagatggtgatagttactttttttcttatgtttcctatttttgtatgtctgtatatattatctccctttttatctatgtgacatactgtatatatatttttgttaatatgtgactacgctgcatagcctgcattaaccaagtaaacaagcaaacacaattctatgagtgcaatttcaggagtgtactgattcattacttttgatttcagtttagtttcttatattaccaacttctgacagtaatatgattcaacattatttcggatggtagtacctttggcagtttatggttttaaattctgtgaatattttttattgaaatatcctattctcatagcactgtaatagctgcaaaatgtagatgtggtgcttctcctagatatttcaatttcatactactagcatctgtctaacagggactgctttggttgacttaatcttgtaaatgacagacttctggaggatgccagtatgagacgttcttatgatggtctactatggactttgaggtatgtttatgatgctagttcaggtgtttactatgctaaatttgcagcaatttccttcatatatttgctaatattagttgctgttgaggtgtttgatacaaaaaatatgtaaatttatatgaggtatctagggatctttgttatacttaatttttcaagttgttaaattcgctgatcctatatttcagttagtttattgtgaaacttcaatttatttgaaggagtttgcaagggctctcctctggtttgtcacttccagatattactatggacatatcgaagtcatctgcttcttcaagcgaggtactttacatgcctttcctgcctttgtgtgtgtgagtctgtttctcatatgataggtgattggacaagttttgttcgcagaaacatgtattgctgagatttagagcggatttggtgttgttattaaaataaaataatacttgaatcccttgattatatcgtggagaagttgaggaattatattgtctctatgtttgcgtcttggcaaatggttttggtgtaaaatgaactgaacattaatagcctatccacatatagggtttttcttatgatgttaagctagctagactcaacttaatgttagataaattatgtgaccattttcaataaaaaccaggtggttaggcttttggatacattagctgattgatttctgggaatccttttgacttttggttttatgattgctgaaatggttttcatgccctattcatattcagctttgcattggaattcctgatttcattaatataatatcttattatgaacctgatttgctttgtagttagcttttggtttctaaactgtattatttgcagctagatcgtggttggcaatcgatttggagttctttaatccacgggctagcaacattcagcagcatgagtgtaattgtacgttgcacttatctacttatattctttcttgattcacacagtaaacaatttgttcaaaatctgttgcttcttacggtagaaactagagaaagtattaaaaaaaatcctgaccacttggtagcaaataaggttccacctatgacgtttgaacttgtgtataggtaccagccaactacttgaacttaagatttttgatctttctaacatttctttcgaacaatgaaaaagttttctttgggaatttttgtttgatcaaacgttagtggcttatttgttcggagtttcttttctagtcatttcccgtttaagttgagtttcaggttaactctgtaatagttttagttaaaaaagatactttaatggggatcaaggtcaaggggtttcttggttacccaatactatttaagggtggttggaagttgttttagctaaacagttttcggttactcgcaaattaagctgattagtagccacagatgcacgcacgtatggctgatgctacactattttaatgcaggttgatgctgtcttggtactccttggatcaattatttcaagtgtgagttttttaattaagttttatattttgttttaaagacttttatcctcttaatattattgtctcttcaatcagaaccacattaccgttaaaattctgcctcaagaagtttgggatcatcaattattcagacacataccctctgagtaagcctttcatactcaaaacttaataagctatgttgttcagctatttcctgaggtgtacacataggctagagcctcactttttctgaaaaaaataaaaaaaaagtttgtatatatcttattgttgtttttactcaataagattaatttgtgttcgactacctggttggctttaattaatagaggctgaatggctctactgttatctaaagaattatgactttttacccaggccggccttgtacttcattgcatgttacttttcacgtatgggttgccaggtaagaaggttctcactgtaattgtctggttttggtacattctatgttgactatttctcaacctttaaagtcttgaagagttgttgcatcgtcatggttttatcctatcactgatggttgaatttgtgcagggaaacctgcaagatgatttacatcttcgacgaaatcttcttagagcagtttgtgcccctctaagttggaaggtagttttaattttttcagaagtacacaagtatatttggcacatggatctcattaattaataatcatatttttggtctgatgttatgtgatacctcttactctcttactttccgtggaggaagtattgtcttggatctgaccaaacaaaatcgttagcctgaattgtttctactccaatatgaagattgtcaggcagtgaaatttgaccttttatgttattttctgccaactagttgttaagagctgctgcattctattttcacctgatatttgtgaactgaaaatcataagatatagtttgaagcctcatcaggttcactgagtgaagtaagcattgtagatttgtaagtctcgaatgatgtgtacctcattgtaccaaacgatcatattggaaatcctgcttgtggcttttacattcttaggttcgtttgactctagatgagagaatggtccagcttctaccagcagctgctttttccctatgtgctggtttcaaggtttcacttccattgcctaaggaacatcttccaacaccatctcaatgggatgtctgtgaacaggtgagtgatgtggtgaaggtgctggttatgtttgataatttttcatcttatgaaagaatcaagactgttactggaatttgtttttctttcttctgcagatagatgatgttgatcgagaaagaaattttggactctttgaatgctctgtggaggctctaacaagaatttgctcaaattctagcaaggtggaggatccttgatttcttttccgccttttcctgactcatttctccgctgacagtttttttgtttccttgtagttcagatctctggctgccaagttcctgacgtagtacaactacctctggtgttaagagatccattgcttcatgacatggatatctattttcttagcattataccggaggtcaaggagaaaggaccattgtctgacatctttatgggatgtgctctgttgtgtcattttatgcatggttcttacatcacaaggtttgttaacttgtcaacgagtaatattgttattgtcttatcagactttctctatcgaaagtgttcactcctttagaatgtgtatatagtttataacaagattttcatagatatcttgatggacggtgagcaccacttgtagatgcgtctttgttctgtttgtagtgtaatcatgttctttgcatgtagctgtcagagacaaagttgtgatttttttgggaatcttttttttttcacttttcagaggtttaagacaaaaatgattgatggttgtgaatatggctacaccctcgatgaactagcttaaattgtatctctttgagtgaacttttctttcagtcaactggattttcgttttcatttctcaggaagggtaaaggaagcagttcgttcttcttaaaggcatgccagtatttgttagaaggcctggatcatgctgttgaatcagtttcaaagagcctcaatgatcttcaaaggcgtggttccttagggtttggctcagattttaatgagaaaggttctataatagtttcattgaggtcctttactcaatctcctgtcttcagcaacagaagagaccaaaatctccttggcgctagttatgattttgtaattcattccttagagaaccttttgcggtcttttgctaaagtctatgaagaatatactgagcacgcatggaatacacattcagacactgtaccttctaaatccttagcacctgattccccagaagttggcaggattgtggatatggatttagatttagctgaagacactaaagagagggatattatagctgctgggggaaaagctgtacctggcctgcccgtttctatgggtaactggaagttgggcatggtatcgcttatctcatgtttttctccggtacttcagtttcctacatgggatgttctatataatctattggagaaggaatctgatcctaaggtatttcagcaatcttttttattataccaatatctcaaacttttgtggtgaccttatagctacaaactgcttacatgtgcaggtactggaaaatatactgtatcatctatgcaagctttcatgcttgacttctattccgaaggttgatgatttggtatggagtttaatttgttgatttaaatttgctgtgaaatattttgagaaagaaaatagagggtttttcatcaacatctcaaccacattttgttgtatttatgggtatttgcttcattattttactttaaggttattttcttggatggcatgcttagcacacaagtaaagatgaagcgtaactgtctcaatatagtcactgctctgcatgttttacttcatactttatcatcctcgaggagggattcctctggagtcgaaaaaaattgtggtttgtctttgaaagaagcagaaagttttcaggtactatctctcctgtttaaggtgattatttggttctttccagggatctgctttattaattgctcaggtaatgtgcaggtctttgtccaacttggcgcaatggtgaataaagtttctgaatttggtctcttgggatggtttgggcgtgtcaagctgatcaactgtatatgtgatcttgtcttacttaatcctcagactggtcaggtgcgtacttcccattttatcactctttcttcagacttgataagctgacatatgcaatattaatctcctccttatgttttagcttctctttgaactattttcatgaagcaaaaatgttcctgcctcaaggttgcatgacttttttttcttgtcaaattaccattggagttgaaaaaaaaaacagtttgttcagataagactattcctgttgtttggagatgaaaaattgaaatatattcttgcactcattacttgtagcgaaattgttcaagtaatggagaaaaattacagtgtgtttataataaacaagtaaacaggcagttttcctgttttaccattaccgctagtagttttctttttgaaatttcacattagccggttacagctaaatattctaattggttccttgtggaattcttattttatttagtctcttgttgtacagtgaattaagtttgtgttttaatacagacaatgattgagcgacttctgttgatgctaagtgactctgattatcgagtgaggtttgtcttggcaagacaaattgggattttattccagacgtgggatggccatgaggcattattccaagatatttggtaaagtttggttattcaaaattattattatcctgtggcttttttaagtagagtgttttcctactaagacaaactgttagatactcgttcgtacagatcttgtggcttaccaaaaaagaaaataagagaaagaagctgatctctgtctttgttgtgggtttctgttatatactcatttctacagattcttgtgatttacccaaaaagataagaaaaagaagaaaaagtcgtattctgtcgtttttgtgagcagagtatttgtttggcatgttctagtaaatttagtcatctctctggaaaaccttttcaaaattctgatacattattctttattgattctgagtcttatgacgagcatcattctgtaagatcagatgcttcacagggcttgttatcttttgaaattttaacttgcacttgagcctcgttatccgtttttattatgtttgattgtagtaccacattagtatttaatattttatttttattactgttttcagaattcgttgtcagattgatgtaactcattagttgtaaacttttcccatttccttttccagctccagctttggtattaaattggtaacctcctcaaaggagaaactagttaccgcaaaagatgttttggctgttggtcctcagcctcgccaaaaaatggagactgtcatcattactcttatgcacctcgcttatcacagtgagaacatagagttgcaggtaatatttttcattcattttcttttgagttcttagaatcattttgagtatgcaataagctaagcttgtgttaacatcgtattccaaactgggtgaaacgcaggctgtatttatgatgtgcgctgtttcagctaaagatccctgtcagaggtatttcctgctagtaattgttactgtcttttgtattagctgaaactttcttctacttatcttgccttcttcctactagggaattaatcattgccgcacttgacaatttatcagcacaactccattacccatctaggttcaaggtgttattgctgattcttgtatttttttttctctcttccacaactgcatgataaatgttcttcttgtttttacatttctgtgaatttcagcagacttacttgagattaatcccctctgaaccttgttaatgtgcctgctgacttaaactgctttgtgcagtacctggaagaactcttgggcccaatcctttttcactggattgcatctggtgtcagtttagctggccttattgaggtatgctgcaagttgatattctctgtttcatagatcaagcagttcttttctgtgatggttatattaccttttcacgaagttattgatgtgaactttgtttattggagtttcatttgttttatatatcaacttcaaacttgtattccagttaagtagattcaatatttttttgtttctcttgcaccatgggtttacaatattgtttgttggagtttcatttgttttatatatcaacttcaaacttgtattacagtaaagtagattcaatattttttttgtttctcttgcacatgggtttacaatattgtagatagggcacaatttgattacaaaatcaaagtaaattaccagtgaaagaatgaaatatcgacatgtgcttttggatatctagcaaagatgtcctaagtggcaatttgaagaatggaatgagtacctattagcattttatatcatctggtggttgctttgttgcagacaagtcagcttttcattccaaacgctgaaccgaaatatttcatccacttttgttcccactggctgcttccagctcttctattgcatgaagatcatactaacctcgactgggtagctaaggtaagggtgcttccttacatcttttatggacctaattgaacgttttggaaaactccaatctcagtttatggtgatgcttataggattttttaatgagatttataaacttttggttgctttgtcttctattcttgtatgggcaattaagatggtcagcgatttgagcttttccgatctttatttcactctctgtgtacaatttgcagatggctggccaaccagtggttgttttggtcaaagaaaattttgtgccaatattttcgatatgtatgggattgcactgtagtaaaacgtcagaatgtgataaaggtgcaatggtgcttcagaattcaatattgtatgtaggtgagaccagcgagaatgagagggacaagctgattaaacagaatatggtatgataccttgtaacatttaattcatgattccagcaatctgtcttttggtgttcgtggtggaaaatatccatgctagtctgatccgctagtccgaattaaccaaacattgacggtttaatttcattttgtcggagatttcaaaaataatatatatatttttgattataacgtattgaatatctaatgggcaccttgttttgttttcaggtgtctattgttagttttattttatcatgcgcttcgtcttcaccggaacctccagttcctactttttctcgtgacactatttcacttgcagttcaaacagttgtggatggttttctggaaaagtaaaatttcgtgctcactcaatgtagacttgttgttttagtttttcctttttataaggtcttacttgttttatgcagcactgattatcctaagaatgcggccatcactgacaggataaacatttttcgcccggatagagtgttcatggtaacattttaatttgccaaagctttttaatgaggtcacactgttcttgataatttgatactttagtcacaatattgttgttgttgtttcgcagttcattacagaaatgcactatagaatgtcagctgcatgccatcatcggcatacgcgtcatcatttggccgctcttgaagagcttacaattcttcttggtcatagagcgttagttccaagttccttaaagtgagcagaattctcaatttatctatttaatcttatttgttctgctactaaacatgagcttcatctgtaaattaaaatttgagtggcattgaagggtgaatatatatttttcgagcattaaaatgtactattatctttaattgtggtctctttcagctacatattcaatcttgttggacaatttatcggctatccctcactacaagaccagtgttgtagtatagcgtcctgtttgctggatttgttcaaaagcaatcctgccaaagaaattgttagtgtactaggtgaccaactccaagtaagtgttacttaatgttatcatttgggtcctcttctgaaataccaagggttttattactctagaaaatatggcttactttttctctatctgctggttttttagtttttggtttcaaagctggttacatgctgcattgatgctgaagcagataccaaaatttctggtgcgaagtcatctcaactggttaatttgctacacaagctagttgttagttcagactcttctcttaatgaagatatcagagtaggcgtcctacgtttaaagttgccttccttttgtcctaccagtgccaggaataatagagaaatatatatgttctgatttgttcatcgatttcaggacttggaaccactcccggatttaaaatatttccaagtcattcgtgaatcacacattaggatctgcgaagcatattctccgaggaatcatctgttgaaggttgaacactctacatttttaatttacatttttcttgaaattttatcactatccaactttttgtttctttcctgttccactatccaacagtgttctagaagatctaattatcttccaccgagattcctttccaggaggtatcgattctatcttcctgagttaaatcatcctacaatgtgcattaaggttatcctttgtggcatgatttgcgtaggatattagctgtagaattaagattacgtatggttcctatgattttactttggaagactgtagtttttctaattacacaaagcagcaacggtcaagggagaaaaagtttctcactattgtaaattcatttctggttattattaatttttatgtggttagtctgctcgatatctgagctactttgtttcattgtccgtggactatctagtttgtactcatgggtgaaatgtttgattctgtttctgtttttacaagttaatttagaaggcagagagtgttttgtctttcaattttatcgatatggcttttacctttatagaaacaaaactgaaagcactatcccaaaacatggctaatgaagtttatttctagagcctactaccctttagccctctactcttatcacactgctacaatttcatcaacttattatgccctttgcagtctccaagcactgcataacaagctcatagcttctgaagtttctcaagaagatacaaatggagaaactgcagaaacattttggcagtctgacgatgaaattgtaaatgctgtttggactcttgtccgagtgtctgcctctgatgaagccgatagtatgagacttttggtgtctgattttctttccagggtaactgtcattcgcttgtggtcagtatctcttgcaatttgaatatatggtcttattttctgttcttttactgtagattggtattagggacccccacactgttgttttccatcttcctgggaacttagtctccatgcatggtcttcaaggttttggccataatactggatcaaaagtcagatctttgactgagaacggcatatccgatgaaacccttatcacactgctaaattttctgaagaagtatcttttggatgactccgtaaagattattgatgtaacatcacaaacccttcgggtcagttttctaactttcttacctatccagatttgaccatccttattttttgtcgattgtttgattggtctcagttttttataatttacctgtagtaatttgactgtgcctctaaattccgtaatgtttggctatgatttaatttggcataattttttcttgattctgtaattagccttcaacttttgttctgctgcttcatgtttttcacactcctgctaactcatctttattccctgtcggatgtccgatctattgaaactttaataatctactatcatgcacatgaaagttatgaatctttctgtcttgtgagtcattatattttagtcaaaagatgtctaatccccttccccagttgtcatgcattttaggggttgtacttcatttcaaagatttattctgtaatatcttgtctcctgtttggaaaggataattgttcgcaagttttactttaatattttatttaagctatatagatgtccctctccttatttcagggaattctttcaaccgaaaggggccagcaagcattatcatcttttgattcatgtgagagagctttgattgaggtgagcttcttttctgcattagctttctggtcttatgctacttttcgtgggttgatatttctctgataattcgttaagtggagaattgttcccatgggcaggcattgtttttatcagtagaatgctgatgtctaaggatatataagatacgggtctttcagaaagttgtgcaaattgatttcaagaattatattgtgatatttgtgaatatgtaaatagtcagtgactacattcaaacaagtgatgtatattggatttcccattcttgttagggtatcctaagttcaaaactgctctgcctgtccagataatgtttttcttttggtaggtgcatggtaggggcgtgaaccttgacattgtggaaaagatcttattggatagccaaaagcagttcaaaggtaatctaattatcccatgaaccttaacattgtggcgaagatcttactatacagaatttgtgtgtaggaatctcatggttcgagttactaatcccacctcatagatctctttataatttatttctgtgaacctttcgtcttgctagatgctagaatttgttttaatgtcaagtttctttattgaaaactgaaaccgaatggtactaaatgacgggtatgtaaatcttgatgcaacctaaaacaaaaaatggaggatactgatgaagtcatcgaggcatatgaaatctttttggcttttggttgcaatcgtgaaaagttgtcctgattgatttttagactagaatgcctgggattattacagatttcagttaacgtagataagtatctctattacattctgcacatgacatgtccatgtctgtttaaacatattctattcatgttccactcttcctcttttttaaattactcaagaatggttcattttgggcctccagccgagaaattttcactggagacgcccgaagtgtggtccacagataataaaaactttgatagatggatttgtcagcttgtgtactgtatgatcgctttatgtgaggatgtcccaataaggtatctatttagttccagtttaccatagttatctatttaaagtatacaagtaaaatcttgcactgagtggatcattgttgctgctttgtttgacaggttatgccagaacatagcattgctgaaagctgaaatctctgagcttctattccctagtgttgttgttagtcttgcgggacggatagggatggatatcaatttacatgacttaattacgtcacaggtatctcatgaattttttggatataccaataatgcttcttttttctacttgcttgcattgtttcttctctggatatctctgtttttcgagtcaaatcctcttctcttgtgttccctatttctcggttctgtctttattagagatttacttactttaatgttgccatcttgacctcttctcgacttttgtttacaactgaaataattttctttatagaactatggttgttgtttttgttgatgagttaagcattatactcgtgatttgctcattctagttgtatactgtaaggtaaatcctctagcctggtggctgcgtcatgtttttccattagggtcgtgtatgttgcagaaacagataatttagtggtcactttggctaaagcttgtgatccccattggcaggtgaaagagcatatcttcactgattcaaacaagctaacaaaatcgaagcaagttatgttaaatactctgaatgaactgcggatgtgttatgtcctcgaaagatcgattttttctgggcaaacaaagagagaaaaggttagggtattgatttcatgactgacctgtttgctgtaatgtttttaagttcttgagaaaaatggttatcctgcatatcaataacagagaaaattatgctatccatgggagtgcttaaagacattctgctattctattttttctttacagtgaaatctgtatcatatgggattttcttctataaaagatccggataatatatgagagatgaccaaaactaacgtttggaatgctcttacagaattcaagatcttgttccacagctgctaagattagagatgtggaaagtggatcaaatggaatggcagcgtccataactactaattgggagaaggtgcatattagcttcaattaccatatgcattgttaggacgatcagcatttctgatccatgcaatgtctcatgtgtctggtgttgtcataaatcttcttctcaaagtgtttttggcttcctgctaaaattgcaactatgttttataggtgtgatatgtgataggtgtcacaacctttagttttgttgattattagatgccttgttatattttgtatttatgtcatatatgaagaattgattactttcaaatgatcaacatgaggtttagtaacttaattttatagtaaaaccatgcaaaaagaatttcaccctgtcaggttttgctacttctatgaatgtcattttatgttgatgttttaattcatttttctgttgaagtatttttgtatcatttctatggcactagttctctaatcagttatacctcttgtttcttttaaaatcttcataatacagaatgacttttgttgatcaggtttattggctttccattgattatcttgttgttgccggatcagcagtagtgagttacccctttcgtttaaattaacgaatttaagatagaagctcttaagttatttgtagtatataactcttctcgctttcccaggtttgtggtgcatatttgactgcttccatgtatgtggagtattggtgtgaggagaaatttggcaatctaagccttggagatcctgatttttcttatcatgataaggtactaaacaaggaatgcatgttatcgttcctctggtttccatcttaaccaactaactcattatgcttattgattaatgagtagtaactttatcgtcatctatgaaactttcattggatgcacttttacaaaattgcaaactcaggtctccatgtaaaaaaggggattggtaataagattttatttgcttggtttcatgcagcagagaaaatggttgtttgtgccgatttctaatctttccttttctttgttgttaacagttaccggatcatgttgagatacttgtgtctgcaataacaagaataaacgagcctgacagcttatatggggttatacattcaaataaggttcgttctgatactaaaattctttcctacagagtacatattcgatatctcatccacacacttggatcttgcctattggaaatggttgctagtctgtattctcctgaacttggtaacattaacctttttgttatctactctaggaatgttttgagacatctcccgtttcatttgattgccaaaatatattttcgacactgattagtaaaaaatgaagtagctaaatcatattgcagtatttgtttttaatttttttactggtttcttatatgtgaataatactttctgtttctgttacatggatgcaatctaaaagttgtctgctcaaataatcacattcgagcatgagggaaactggactagggcactcgagtattatgacttgcaagcacgttcacagaaaatggtggtgccaagtagcctttctgaaaatctagaggtggaacaatttcagccaacaactagtgcacggcattcggtttttggtgaaggggaggtccagagacaaccgttcaaaggactcattaggtcgttgcagcagacaggctgtatgcatgtcctggatttgtattgccgaggcttaacttcccgagaaggatgctttcagtatgatcccgagttcatcgaattgcaggtatgcatcctgatttctccttttttccaatacatggaagtctcatgtctaaataaggttgttggtaaaacataaatagtccatgggataaagaaacgatatgatgactcaaagatcttgaaggagtagcttagcaacaatatttaccagattagtagtttgtttcgttgcaatattggcccaaattctgttttaacaaataactcatcgaacaagactcagctgtggtacgtaagttgtgttgcttaggtgataattcagttgcaaattaacttcttgcttgcagtatgaggctgcatggcgagcaggaaaatgggatttttcattactttatccgcaaacacattgccaacctctgcaacatgcaaagaacaataattatcatgaaagtttgcactggtaacacatttctactcttatgtaccgatgctgctatacttagccattagatatctttccctgtctatatctcacgattgcaccaaatatgacatcttctcaacactgaatttgccgctggtcttaagacttttacttaaaagtaatatgttacagaggaattttagaatagagtagttgaagtctccatactttcctggtatctggcattgtttcttgggtcaagtcttagtatcaattttcagttatgattatttaagctttgaacagtcatcaatattacacatgagagtcactaacttccgccttaggcatgtctttttcgatgttttaacatgtttaatttctcagttgtttgagagcattgcaagaaggggattacgatgggttttatggaaaactgaaggatactaagaaggtaatgcatgatttcagtttattatcttagaattggaaggttgcaaccttcagtgtggtaaagaatatttgctttctctccttttcaggagcttgtgttgtccatttcccgtgcaagcgaagaaagcactgaatttatatactcaacagtagtgaaacttcaggtatggaattttaaaattgacattaacgtacaactcctttttccatcatgcttgtcatttgggtgcaaaattctactccttatttgttcatattcttgaatgtgataatggtctttctcttgccacaacccctttaaaagattagcacactctgggagtgccatacttaaggtcatcttgatcttaactagccaattacactgcaagagctgtcaagtttaacttatccaggtgtcgcaagttccaaaacttaactatgttgagatgttcacctttgaaaaaaagacttttccatctcaatatttcctcacaaaactatatctcatagactaaattttttcatatgtgaactttcaagctggggaatttatgaatgcaagctgcatgttcattaagatctaaggaaaaatgctgatgctaaagattccatgtctctttggaaaaacaatggttttgtcttttcccactttttgatttctcatgctttatcatgtctagattcttcatcatcttggactagtttgggatcttcgctggacgacatcttcgcatcaaagtgtgcatggctatctagtcaaacaaatggcatgcgtagaccccgtcattccaacaatggatcaggtattttctctgtaacttcgttttcaagtggtttgttcacttgcttctactgaatcgttgaaagcttcaagaatttatgttattagtataataagtaataagttggcaaaatgtcgaggctgcttagggacttttattagtattctttattagtcttgggagtgcacatatatgctcaaactacctagaagctaagtgagataatcttgttatctgagtccatgtttaattatgaaatacagttgtcttggctgaataaggattggaactctattattacgcaaactcagttgcacatgactttgttggagccatttatcgcatttaggcgagttcttctccaaatcttgggatgtgagaaatgtaccatgcaacatcttttgcagtctgcttcattacttcgcaaggtatgtataaagtgaaaagctacaatttcccttgtagtaaaatgcagaggaccaagacattatcttgttgctttcagggaacaaggttttctcatgcagctgcgtctctgcatgagttcaagtttctttgtgcaagaagtaatggacaacaacccgttccagactggcttggaaaggtaatttttttatgactcatcttgcatcttttgtggaatttgaatagcctgcttttttcttccttaattgtaaatatttatacggggacgttttccttattcacgtttatgaacgtgagaccaaagttacaactaaatttctgatcactcatttacccacgcctccttctgtcaacaaatagttgtcacctaggaattaaaatatttttaactgaacaaaggcatacaatggttgttttaatatctattagttactttgccacttagttcagaacagggcaatgtatctggtccactactagagatatgctttccagtaactttttttgtgtgtttctcagcttgaagaggcgaagctattacatgcccaagggcggcatgaagtttccattagtcttgcaaactacattttacataattatcaattaaaggaagaggcttcagatatatatcgtgtcattggaaagtggctagcagaaaccagatctagcaagtaaataaattgtcactttttattggttgaaagcagtttctatctatgcttgtaatgaacttctaagaatctcaactcggttcttttttttttttttttttttgcttctcttgaaaatagttctagaactattttagagaagtatctcaggcctgcagtttcgcttgctgaagaacagagttccaagatctgcaaaagattagtagatagacagagccaaacttggtttcatctggctcattatgcagatgctctatttaagagttatgaggaaagactctcctccagtgaatggcaagctgcactgcggctacgaaaacacaaggtcttatccaccttggttgctcaaattcacctctttaacattttctttttgtacttcgttttctgtgtgtaggatatgcctatttatttccttctaaatgagcaccaatcaatgactaatcccttcttttgctgtatcagtaatagttttaaacagcttcaactccaaaggttgttcttctggtgtgggtgaaactggaggtaactaactagtgtgtttaatttttcagacgaaagagttggaggtgtttattaaacggtttaagagttcaaagaaggcaagtattagtctacttccgtttgtttggtctctaaacaaatctcttatcaaagcatgatctgatggattggccggtctaggcatctctctcattttacttcatatttggtcttttactgtactaggcggagcaatctgactattcactgaagatccaagatctgcagaagcaactaacaatggataaagaagaagcagaaaaactgcaggttttttttattctgccttgataatctggcttatgtagaaaagtagtcatggttttcttgataggtgttatttactgatatgtgatctctctctctctttctcctcaattgcgtaggttgacagggataactttctgaaacttgcattggagggttataaacgttgtctggaaattggtgacaagtatgatgttcgagtggtacgttaatctatatttctgtgagatttgtgtataatgtaagatgtgaaacagtgtctggaattgatcctttatgacatgtcatgaagtgttaagttggcttttagagtcaaatatagaattccttaagaaactggttttaattgtaaggttacaacatctaatgaatctgcagatctatgtgttgctattgtgacttcatctctctctacaactaattagagttgggtttcattatattccttcgcatctatcaaggagtaactatggatatattagtggtcttcaatagtccaacctttcttcatttttcctgttttgggttgcggcggcttctaactgcttttcaacatttctcagtcgtgtttgtgtttgtatacttattggtcatatcaatctttctttggtttttttgggtacgtgatgaagtatatttgataatagcaccacatagattcatttaattccatgtgaatggtcgacctgtacttaggagtttaaagtttgtgactagcgcatacttatatatgccaggttatggtagagtgatctttattttcatataagttatacactttttatttgggaaattttgtcttacattatctcagaaagatatttaacgttttctctggccttttaaaaacatgtttgagattttagcagaaacgtggtgtattccattatattattaaattacttacggaacactgtttggagctaattcttctttctacaggtatttcggcaagtatccatgtggttcagtcttgcctcccagaaaaatgttattgataacatgttgagcaccattaaagaggtacttgactaatggtatcagattttatctgctatcgagaaggaattctttgattttccctccatttttcttgtttagtttataagcaatcttcatctccctaaacgttcttgcaggtccagtcctacaaatttataccccttgtttatcaaattgcttcaaggttgggcagttccaaagatgaatcaggatctaacagctttcaggtagaatacaattttacttggccatggtagaaaacttatgactatgatgctaatctctacgatttattacttgcagtctgcattggtttcgcttatcagaaaaatggccattgatcatccataccatacaatcttgcaggttctgaagtgttatccatctcttgtactctttatatttcttcttttctgtttggttaattggcatcggacttgctagaagtgcacacggtaaaatccttgagtgtcctatgatatcccgaatctgttgaaagaatggaaacacagtaaagtatgttgtgctgtatagcatgccatcgaaattacattattaccaagtgactttgtctatcttattcgaagtcaagtttctgaatactggatatatgtctcgtatttttctgttgcttttggttctagcttctggctttggcaaacggtgaccgtatcaaggataaccaacgcagtagaaattcttttgtggttgatatggataaaaagcttgcagcagagcatctcctgcaggatgtatcacattatcatgggcctatgattagacaagtaaaccttattttcacctaatcttatgcatcataaaccattttgcctggttacttatcagcaaatcctgattgtttttttcagatgaaacaactggtagatatctacatcaagcttgcagagcttgaaacaaggagagaggtctgatagttgagtttagaggaagtgttttgttatgctgtttgctgaacattttttgaaacatttgtggaactctttcctctgcaggataccaatagaaaggtagcactaccaagagagattcgtagtgtgaaacaactggaacttgtaagcatgccattgtttaatttattcatttgcattctcttatctaacttaatcataattattagcatgtaggacccgtgttactgctcaagatagaaaatttcttcgaaacttcaaaactttatgggtcatcttgctaggcactcctatacatacaatggagatattaatgcaactatagattgttcaaattctttagcaaatgttttcctgtgttttcacttgtctgctctcatggttcctgttttgagtctgttgcaactcctaacaagatcgatactccgttgcatgaattttggcgatatatagtcttttcgttgtttatttagttggaagagttaattggttagttgagcttgcaagcatattttccattatccttctagttcagatattcaatttcgctttttctctgtgcttctcaggtatgtgtcaaacattaatttattttgagtgtaggtacctgtggtgactgcaacaattcctgttgatcgtagctgccaatacaatgaagggtcattcccgtttttcagaggtttatcagattctgttacgtaagtccctgctcaattaatcttttgaaaatcaatataactataattttttgcatatctagtgtaaaagagcacttcatttaaaaccatgtcttttggatgatatgcagagtgatgaatggtataaatgctccaaaagtagttgaatgttttggttctgatggccaaaaatataagcaacttgcgaaatctggcaatgatgacctcagacaagatgctgtaagagtttcggaagttttacttgcaatgtctataatatgatacatcgtgtggcactactcacttgcaatgtctgtaatatgatacacggcactgctccctgtagtggcagcaaattgaaagtttgctgacttagctaagattacatataaaatggtctagttatgcaaaacgtgtaccattttgtttcaggttatggaacaattttttggcctcgtcaatacctttctacacaataaccgggacacttggaagagaagattagctgtgcgcacatacaaggtacgtctctgtatcagtctactagaggttttctgttttagagaaaatttgatccattcagtaagctctttataattcatatacttatatacatattctcaggttattccttttactccaagcgctggtgttcttgagtgggtcgatggcacaattccacttggagattatcttataggaaggttggtctagtagactagtatttacaataacatggtacaacaatctctcttccaaatcgtgacagttcaaaactatctgtttgcatatgaaatcacagctcaaggagtgagggtgctcacggtcgttatggcattggaaactggaaataccccaaatgccgagaacatatgtcgagtgtaagcttgtttcctttcacagttcttcttagttgtccatcactgacacctggtaatacacctcaactgatacgcggtgattgattggtggcttgtaggcgaaggacaagcgcaaagccttcgtggatgtctgcacaaacttcaggtttcattttttgtgaaacgttaatttaacttactccgtaagtaggttggtggctgaaaaatccatccccttttgcaggcctgtcatgcattactttttcctggaaaagtttctgcagcctgctgactggtttgtcaagaggcttgcttatacacgtagtgttgcagctagttcaatggaaagtatattcacttttgatgatatttatcctctttcagcttaagatagatgggaatttcaatttgtgtatactttagaatataaaacggaaaaaatcatttgaacccgactaaatggcatttgatttgctatcaggttgggtacatcgttggtcttggtgaccgacatgccatgaatattttaatcgatcaagctacagcagaagttgtccacatagatcttggagttgcttttgagcaaggattaatgctcaagactcctgaaagggtgtgctctctgcctctctgcctctcttccatctcttatctttgcatatttaattggttttcatgtgaatatataatctttgtacaattctcatttgttcatttttgttctgatctgataggttccgttcagactgacaagagacatcattgatggaatgggtatcacaggagtggaaggcgttttcaggagatgttgcgaagaaaccctgtctgtgatgcgaacaaataaagaggcactgcttacaattgtcgaagtaaccagatctgaaagttttaacttttgattttcttaaaatacaaaagtttttttgaatgcgtaatcaagatcgcttgttttgcaggtttttatacatgatcctctgtacaaatgggccttgtcccccttaaaggctttgcaaagacagaaggtacctcgtacccttatagttaagctgtaaatgtacaatgtaatgacctttgcaaaaaggttatgaaatggacttaactacggatttttgtttaaacaaatgcttccggtgctctttatttggatctatttcttcacgctaattattttgtgttccacttcattgtcttgatccagacgagattccaattcaatattaggatagtttatcctgttgaatacgttttgtttctcacacaaaggtcttgatccaggaaactgaagattatgatggcatgaacttggaagggttacaagaggagttcgagggaaacaaggatgcaacacgtgccttgatgcgtgtcaagcaaaaacttgatggctacgagggtggtgagatgagaagcatacatggccaggtaaagtttttgacatattaattaaagagtataacatttaaagcttgcattgttcttgccttcttggtgttactgagtgtatttgctcaacacttaattgttttgtaggcacagcaactaatacaagacgcaattgacacagatcgtttgtcccatatgttccctggctggggagcttggatgtaaccaaccttctatatgcttccaattttttgtctatgaatagagaaatctttatgtaaagttgaaaaatactcggctgccaaattttgtctagcttaggatgggaggagcaatctaaaaacggcttttgcgtggaacagaacaaatatgtgaagtaacaagctcaagcctataatatattactgcttttgtgcattttgcgtattggctcatgaagtaaaataatttcactagacccgtattttattatctttcaacaagaaaaaggtaaaagaagctatgtttaaacaagcttcgagctctacattacagaaggtaagtttatacacatacataaagaatcatatttatagatcgtttgttggaagtgaacccataagaatagtggtttctttgtcttgttttgtctttccaaataaacttgagaggaatcttagaggcaagacagatgtagaatctgatttcttttccgatacttgcagctctccagggttcttgttcggctttagttgtgctccgcaatggcagtttgagagtcttgataagcatttcttgtggaaaactgaaccgcataaccggcatttgctaacctcgtctttctcctaatcattgcattcaatatatcttggattaagcaacatttgagtgatagcgcaatacagctatgaactttataagaaaagaaaatccaatgccatcaaggctatgatcaaataccgaaaactgagagcaggagaagatgtgtaatatgttcattgcaagtgtaatgtcgatgctcacctgaaatggaaatattaaagaggatgtgtcgtcacaagcttgtcgggcattacagggaacccccacatcgcaacaaacaaggcactgttctgtaatatgctccaggattttcctcctaacggtctccacgattgcaggaagtgctgccattcaagggtaaggaaataaataaattgtttaacatcaaacaagtagcagcgtggaaatgacttgtaaatcagttgctattgagatttggaatctaattctaacttcattaactttgaagagcaattcatcatcggtaaagtcagcatgtgcaagcatgagggaaagtatgcatgatctttaaatcttggttcaagaaaagaaattcacctgcaaatggccctttggagagatcaattagatctctcaaagcaaaaaattcagagctctcaagaaggtatctgcgagaactgagtcctttgtagagtgtcttttggaatgggcagcgtacatatggaagcataatggttattcttttccggatgctcataatatggttgagtgcagggacttttgaggacaaaaaagggttgaccgcactgacacaaagcataggctgccaaacaagatttgtcagacatcaaccaaatcaaggcgaagtaaagttattgcaaggaaagtgttctatctcagcactcagtatccaaaaacgacaataaattacaccaaatatcactagacccaaatttacctgctcgtgtatggagtctagatatgattttgccaattgagaaactggataacgattaaaatcccaatgatgtaacactgttgctggcagtactgccatgtcatttgtatggcaggaagaacaaaacaaatgaccagtatattcgcaaagccgaggcttaccccatccaagagctttcacaaagtctcgcacaagagtggctccatcatcaaagtatctgtggcatccagcgcaaatgtaatgctgagcctctagcaactgctttactgatttgtgaggtcgaatatcaacaatgaacgagatggtatttccatacgaagaactggttgtagcagcatcgatggcagcagagcctgttggagatactatagaatccaaccccgaagaattagcatatgcatcttgaggggataaaaacctaagtaacgcatttggaagtgtgggaaaaaaacgggactggagaactgaatttaaacaatcttgaatcaggacagtcctttcagcaacagcattgggcgatgttccaaatattttcctggattctctttctacagaggtccaaggtgtaggaagcgtccagccttgatcagcaaataaagatgtcaaacgacggtagagactataaaaatcacgatatcttctttcaatttcccacttgtctttcccactccaaacccttatgacatacactgtgtattccttcaccccaaccaatctttcactcagcgaaacatcaccttttttttgctttacaccgacaacttcaaccctatcaatcctaaatcgctgggaaactgttggagatgaatcatctagaccagacgttgtagcagtttgccccccatccctgttaggcagagagagctgtagttggaacatcttgtcattcttagaaaaccttaccccagatgattcaccagagtcgagcagtatttcttccatatcatgaacaaaatcatcatagaagtcatttagctcagtgttctccttctgcaagatgagtaatccaaaaccataaaacttcattcaaaaataaaagaatcaaaaggagatatagtagaatccactaagtttacagattgcaggaaccgtccctcttaatgaacaattgacttataatggtgatagtaacacaacagtagtagaacagttaaaccctcagatttccactgtttagatgtgagaggagcatcataaattgaaatgcactgttttcccagagaagcatggaaatctaacagacttggacataacccaaggacaatacaagcagagttgacaggcagaaaaaaataacgttaataatgtttcatatattaagtagctgaccttaggttgtgtgtaagtgacttttgaggcatttgttacaggatgagaatctctagatgatggcatatcagagttctgagatgccaacaacggttctgaggtgcattccccaaatggatttgactgttttccatcctcagatgattcatgaagtagtccagaagaaacatcgtcatcaaggtcgcaaaccccacctgaagaatcttcaatacctaactcagttggtgtaatatctaggacatcatcagcgctacaagattgaaggttattcatgactacaggtctatcttcagtttgactgttgccaagacaactgccccgaagaggctcatctgttaccagtgattgacgaaccaccaaggttttaacttcagcgctcaggtcaccaaaatctctagatctaatatcttcaatatttgcactgaagtcacctacatctggagcatgtctagtgctcacagttacattttcatgttcttcccctttttctgcttgaactacatctggaagcttttgtaaagctacagagaataaatctgtggatgtcccttcactttcagtacaccctttatcacgcttctcaaacccgctgaagtcaaattgagtgtcaacaagttcagtggcttcaagctcaaactcatcccaatcatttgtaccaaaggcagtggaagaattgatgagaaatggattatcgttctcatctttagcctccttttgaaactgtaaattccgtgaaacataattacgagaatgatcacctgaatcactaagcgagtcatcaccatcagaatgttcatcatcatctatggaacttccatcttctctatctataccactatctttttcaattgtagctccaccatccatcaaatcaccacacatatcgatgttcacattcccggtgtttaacccgggcgcactactacttctaccattacaagagccgccctcatcgaagaaatggatacctcgatcacctaatcgtgacatatccaaagaagagagcttaactagacttggtcccaagctaaaattctcaaattcggaatcctgaaacggtccagtagagctacacatactcggcgttcccaaagccgaattcgcactacaataccgctcaaactctgattcaccacaagacgagtaatgtaacgacgaacctggcgaatcaactctcgatgattcctcctctccattgatcatttgaaaccaaaaccaaaaccgaatcaaccggaaataaaacagtaaattatacaaaaccgatcgatggataacgaacggagacggattctcacaccaattgatgaagatccaagcacgccaaaatccccaatcgggttttgaaaattgaaattgatcgagccaagtacttgagaaagaagaagcaacttggagaacaactgagatttaggtgcacgataagagctggacgatgcgtagattagcttcgtctatatgcttggagcttcttcgtctccttcgaattgaattttctcggagccaaacaagaccaggcttaggaatcatgtaagcaggattgacacaagacgatttctgaaaatttcaactatttctttaatcaattttagaggaaatatgtaaatatattacttttaatagatgataatgtaaattacaatttacttatcaagccctcatacttcatatcaataccttctaaaccccattatttattaaatatcacaaagtagtccttacgtcgaatagagagtaaatacagagagcatgatgaccattttttcttactttgaagcaaaaatggcctctaaatctttgtaaagtcccttaggtctggatttgtaatctgcagatgattccttagaagagcttccacttgtctttgttccccaaatactactgctccaaccgcttttgctacacgaaggatcactaggaaccttactattgctcctatctcttgtgaagctagactttgccatttctctaatctgtttcaaccatggcttgtccaagctacccgagcttcggcttccggaagaatttctatacctgaattctggggttgtgcctccattgctgctgcttcgtgcttctagttgagccacggggatcttgttcttgatcattttctgaggtaggattaacgcggcaagtccaatgataaacatcttaagaccactcaagaaagatctgttgatttggtctaaccgctttgtttgtttgtacaatgagtaccattcgttgcacatcagcataatgaatccaatcaagaacaatacgaccatgaatatcccgagtttctttccgcttgcctcgggaaagtctttcgccaagagcattagacatgaggcgaatacgccgacttgacatgctatagagatgatctctacaagctgtacctttttcttgatgaatggcttcttcagaagaaggaaaaacagctgaaaggaagtgatgctcaacaagaccactatcggagttttcgcagtttcattgtcaaggaaagcaccagcaataatccccaaacacaccctcttcacagtttcgagaaatgtgtagtaaattctaaggattccaaagagtttctgtatgcaaggagcttcagcatcttcgttttcatcatctgatgcgatgatccgatcatcttgttgcttgagtggattgcttcctgaaatctgtgtgagcatgtactttggtggaccccttaaatcttcgaaaactggacctaacctagttagatagacagagttctctgttttccatgtccattggcctcttttaccaggaccaagggtcactcggatgagttcttggtaccagtggaaagtttggccttcttgatgaatctctttatactgtaacaacttcccaaacgttatcccgaccgagaggaagagaaacaatgccagaagcagaatagctaccacgcaaagcacaaggataccaacaatgacactggcttctgcagctccttggtgtttaaaatagcctgacaaagagagaatttagcgtatgtgttcaaatttaaagatattctcaaggctggtaataagaataccttgtataaggctccttgcagctttgcagattgaaggtaaggcgagaatgagaagaaacagctcgaatcttgggaagacaaacgcaccaaaactcctcttcttctcactgtgtgctttcttgaacttcagtatcagagagaggactatatgcagtagtaccaaacttcctccaattatagctatccaaaacatgatcctattgaaatctctccacctacaggaaagcgaaaaactcgaatatttatggcttcttcttaattagattaaaagtaagcaacaaatgctgcaataaaatcttcacaaaattttctatagaaagaagtatagacttggattatagtgacttacactgttgaatgtggtaggccaagaacgtgttctgcttctggcttaagatttgaagtctgtaaacactcatacagtattaaaacatgatcaaaagaatacaaaatacagggaagaaaaaaacgtttcttttgacctcaaagaataatctgtactccattgcggtgagtggcaatccgaatactgactccgcgttggttgatgtcttaagattaatcatgttgttatgagttttagaaatgaaggagtgtggaccaatgtaaggacttgtggccaccatgatctgttccttgatcttagtttcccatgggagaggaaaataagggattatccactgaatccctctcacaagttcatagtaatcaacaggcaatgtcaccggtagccatctcgtgagtgcaaaaaactgaatgtgacaggcagttctctgcattagaaccacaaagcacacaataccatttgattaattatgtaacttgcaggaaaaacaaaggcaatatatatgtagctttataaaggagtaaaaactcatacaaaaaggttcctcgtggggtctgatatcagataaggagatggtcttgggaatgcgccaagagaataaaggcttgtggttgaaagagtgaggagtcccgcaacgaaagacgtcaccaagaaaatgtaagttgttacccaagaaatcacagaagatatcataggcacagaatctgcaattaagtacaagatatgaaaaacattagaagaagcagagaaacagaattacagtacttgataacacatataatttggttgaaacacttacaatgtttcacttttaggatattggatgcaagatttttgtttcccgcgacatcctgagtaacattttcaggaatcttaatagaaagtgtactggtgttggcttttacatatacaatgtatatgcttccactcagttcctcaaagctggcaatttgtggaaaacaaaagaagcaaaaagtcttatgtaaatcacttagcatcaaaatcaagaagttagaagacacacaagaccactaacctatcaagatatccacctgagattgatacaaatgaggagttaaacccaaacactggcttcatgaatttgatccagacagggatggtgtgctttcttgtcctcataccagatgttgtgttcaatataacatgaggtctctcggtatctaagatcatgcggatacatgtttcattcaaagagagaaccaaaacaagaatctagaaacaaaaatgtgtaacttactcaccataaagaaaagtgagtggtgcagttggagatgcaggtgtcccatgtctgcttctaattgaattcgagtcaagggtcaccgtgactattgcacgccgtgatgtatttgtgacctgagaacaaaagagtttgaatattacattcaaagattaacatgaaacgaaatataacgatagcacaaaacatccttaataacagcagcagaagcacaaaccataaacgcgaaacggcgattcccgttggtatttccgtcgataggaagcaaatcaccttggtttgtgtttagtcgtctgagaatttcagccgaagaattcagtaccggttcagagaaatacaagtaaacattcaacttgttgttatcattggttgcctgcaccgtcctagtttggttgtttagcttaagtaacttctctggtacatgagttcgtagattgactaaaacatttcttctatctagataccaagaaagttcaaaatcaatatccgttaaagctgttgaccttaaacaaaaccagggtaaagatactcaccaaaatggacaaagaaacgcgaacccaaagctcttttaaaattgttaccagctatatcagaacaaacactcttattcatcaccaacacaatccttccatattgagcatcaggagataatcccacaagcagtgaatatctaagatattggtcaagaacggtaaatgaagacggtataacttggccagcaccatagacaagaagctgttacataatttgaaacattgtcaagagtataaaacctaagatgaaaaaacttaaaagattgtgattgatgtaaataaggttacgtactcacgtcgcaggaattcacagatgaacagccgaatcctcctctaccaacacatggctcagtaaaagtaatattaacagacacgttttgtgcacttgtaaatggcattgatgcagtcacaaaggctgtaggagaaaccgtatctgcatacacaattttacacgaaagacagttttgatcaatgctagacaagaaaatccaggaagagactcaaagaggtataagaatagtttctttaccaacagtccaattatagtgattgcagccaaatccatgcatcctatttgcgcaaacctcaagtgtatgatctccatctagcaacttcgagtaagaaacttttctttgatggcagtccaaactaatacggtcatctagctgcacagaacacaatcctttttcatcaacatgtgtgacacaactccatgaaaattctcaaataatgcaaatcatatcatgtcaaaacacaagctttttgatttcactaatataaaaaaaaaaaaaaaaaccttgcaacggaatttgcagcttgaacaagttctgtttccatcctcaaaagcaagaaaggaaaatttggctgaagtaaatctagaagtagtaggaggtgctttcaagaacttcacagagagctctgaaccataacagtaatgaaacctgaaacacaaaggggaagagacaacccagaaaagcagaagaagccatgaagttttaagcagacccatttctcaaacaaaatgcagatgaaactctttatgatgcaatcattcatacagagaataaagttataagcaaatcacagcgatgggctacactgggattattctggacaaagtagaagaagacattgtagagataatgtgttggtgaagaggaaaaagagggagaggcagaggattaaaacaagatgggtactagcttctgtggtctgtgatggctgtggaagagagataacggatagtatatgcatgagagcgatgggagatacagtcattgaaagataaaaagacagagactaatcccagaaacagacaaactctggaagaatttattattattccaggactgtctattatatatttgtttaccaaaatttcaaaaaacaacattgggaatatctagtttaatcttctcgtaacccttttgcaatgaacacaggaaaaaagcttcttaagctaagctaaaagtggaacaacaagtcaacacaacacacacgactaaacaagagacaagtctttcgatgatttagaagttctttagggacatcaataccagagttttgttttgtgctgctaaatggtactaaaagaaaccaacaagaagcattaaagtttcttccttttagttaacattcaatacacatgggaccatcgtatcaatgatgagactttcagtgaaagatgagaaagatcataatagttattacaaaacaaagagacccaatctgtaatatcatgtttacctctcacatcccaagtattaagaatagtaccattgtttgaaagaagtccttgaagacatatccatcatgagaatcattctcactcaaaaatgcttctcaagaagacggactccattgacgcatatttctccaaggacatcgttcgaaaacaatgatacatggtaatgaagattttaccaatttatacactccataaatcagccttaatccttcaccaaagccccaattttatgcaattgaagctgtaaaatcgacagagcttgattgaattttgcatcactcgttaaacattatcaaaatttcctagttctctgttttcagataagaggtaaaacgaagacgacgtaatttatagctttaaatagatcacgtgagcagcacgtgaatcttatctaaatctctcacacactttctgctctgatcacgtgttacaattttttttttttcacgaagtgtaagctttatatatcattgaaaggaaccatacattggaatgccaaactcttgtttagccaaacacatagctactcgattacatatctgtgatttgcattgtgaaattcttaataatctcaaaccacataagagagtagttcaaacactacatgagataccaatagtgtttcagcttgttgttcttacgagaaaggggcacatgaaaatctaccataggcttgaaaacatttcaacaaccggtggtgttcaagagagattaactcaatatctccggtttcaacccactataacactgcattccatctgttttttgccaaaatatgaaactaagccttgaaacaatcttagcaaggtcaaaagaaatggatcaaactaagaaggatctaagagatagaggagatttatcagaaagttcaagcagaaaataaaatactaagagaggacaaatagaatctctcacttaacctccatcctaggaacctttacacttcgcgacacagcggagccatgagtgcaatccagtcaatcctaaaatctgcaagagtctcaactactaaaatcctaaagcttgaaggaaaggtaaccccaaacaagccaaagatcgaatactaagaacttagaaatacacaagtggccgagtccaaactaattccgaagttacaaaacgcatccttaaactactgaaagaaacagactctttctttattcattcactatgtcacagacggaagatctagacatcgcgtcaatacagaaatacgaattgaaggggagtccagaggaagcctttgagaccttcgagaaggatcattttcacaagcaacagaaaccaaagcatagtcggtatgaaaccggtattaaactagaataaacagggccaaggcaacacttccagatctaagcatcctcgaatgttctatgagatgctaattaaagtaggagcaacagctccacatctaatgacgatggccgctgaaaacggagaaatcaacggtacgacaaagcacgacatggataaaccgtgaaagaagcgccaaaaaacggcgacgacgaaggccaacgagacgacgataaaacttcaatcttcaaaaaatgttgaaaaaagcataaatactcaaaaaatgctgaaaaagcatcaactttgactcggatgaaattataggttagtttttattgatttactaatttttgttgacatatcattttaatctcaaatttttgttgattttgtctaaatagatacgtcattaaattaattaatattataaattagcgggacatatatcatgttatgttcgttatgtacgatcaaaatattaaaatggaaaaatgagcaaaaatcaacaaaaattgaaaatataattctttactttttttttgtcggaatataattctttactatatattgcatatggtttatttcttttttaagaagatcaactttctttataagaataaatattaaacactaagtaggttacgactatgaaaagtaatttctcttatttattttataatttaagaactatttcgaaaataaatctcatatatagacatcaatttcagaaaaaattgtattttgaaacaacacaccaatctaaatgtaaaattatttatttttaaaaatatgattttggaaaaaattattattaatcctaaaatatcaaaattcaggttgttatcaaaaagtaattaataatttttaaaaatatgattaattttatggtctagagtgtatctaaaattaagtagtttatattttgtttaagtaaaataataagtttggtactttttaaatagttttatcaatatattaattatacaataaaaataaaatcaaaggaaaacttcttttttttttttgttttttgagcaaatcaaagtaaatcttaattcaaggaaagtcaaagttaaaatagtgcacaagtggtctggtttgaccaacaaatagtgtttctgaattgaacatatataccaaatcaagatttggtttggacataatttcatatgtgtatttatatagacatacattggtttagtagaacatatacataatcttttacatatatataataaaaagacttgagaaatgaatatgaaaaaatgcatagcattgatgttggtggctgtagtaataacgaccatgggaggagaagtagaaagcgtttcatgcgagattaagtgcatgcttaagtgtggtggtctattggtgcctgaaaacacctgcatcgagccatgtatgcgcgcacaatgccacaaaccacctagtcctctatctaaatcatcgtaatttcttctcttattacattgaatttgattgttcttttatttttgagtttctatttgttattatgttattgaaaactcaacataaatgcaaaatgtaaaaacaatatgataaaatgtaatttttgtttaaacatataaaaataatatttcatcaatacaaataaaaacttgcatgtttgcgtatgaaacaacttttgtttggaaatacgtatagaaaagtgaaatagtttaaatattgcaggactgatgatgctgtagaaaggagaaacatgaaagaagttgaaggactttcatgttgggacaaatgcttgttcttgtgcgggctcagtctgtcctctcaaaaaacttgcaccgataaatgtaaaaagaaatgtcatatctcatatgtttttccatctcaataatcgtagtaataatttatgtactattttgttgctgaaatataaaatttattgatcaacaaagaaaaatacaattacatggttaaaagttgaatattaaaaaaactaaaagaaaatgaaaagaaaaattgaaaaaaaaaacgagcttaaaaattgtatcaaaataaatttttttcttttacgttgagtttgattatttttccaattgtctttgcatttgcgataatgtatatacagattaaactaattacttgattatccagtggcggaaccaccgtattaatccatcggagtcaaaaaaaaaattcttccaaaaccacataatttttatttccgcccacaatttgtggagaactacttttatcatacatacgtagaccgtatgtccgtatcatcttactaaccaaaatcagtaaatcaatatataattccttacttgtacgagactactaagattactattagtctattactagtactaaactaccaatttaatagacgattaacatgataacatcggcaagaattagtaacaaaactcaaatcaagcacaacttctttcaatattagatttaatataccaaaacaaaaatagaaaagtacctggaattccaatcttaagtctttgttgattacttgattataatctcacacaactcataaactcacaattaatgattagaaaaaaaaaacaaagaagacgattagaagaagcggaaactgttttagattacaaaaagataaaataataggttaatgtatattaatggccttaattatgttataaataacctactccctctgtttctaattaagtgtagtttaaaggttttttatttttttcaatataagtgttgttttcacttttctatgcaaatattaaatgtatttaatagtttttaaccaattatattttacatcatatttttttattggttagattagttgtaattaatgatgtttttataggaaagagataaattaaatgagatttatatatttttttaatttgtgtgcaaaaaccttaaactacaaatatttaaaaacagagggagtattattttatcccaaacttttattgggcttaattctacatacaagtacaattaaatacaatatagttgttgggcttttataagtcttgtcacataaatttttacaaaggtcaatattctttttggatgagggtcaatttaatagaagttaagctataatttttttttcaccagggtcaattgacccctatgaccatatagtgtctccgcccctgtttggaccatgattaattcaggtgttagggagatactcttggcttctcaaaaccggtggcttaatgctcaggaggtgcgatctttattcatgaggtatgatcaattcaccttgtccacaacggacccgccagtcaacactacgggatttcatttctatcagtccaagaagttcaccgacaacgagaaagactatgttcgaaagaatggtaacaggaggacacaatgttcaaaaaaattggtaagaacaccgtactatctaggtcgttgtttttaattctgaagttgtgtgtctatccctaggggtgaacctaagtatttttcttctaatagtatatgatttctattgttatacattctttaattagttggcaattaataatcattattcaaaaaattatcaaaatcaaagtttaaacctacaattgtctatttgtttgtcagttgtttcctatatttgcttctattttgcttatgttttatttattttttattaacttatgtttcttgatctaattttggaccatgattccaggtgttggtgaaattttgttggcttctcaagaaagatggctaaacgctcgagaggtccgatccctcttcatgaaatatgatgaattaactattttctcaaaagagaggtaaaaatgcctctctttttctggcatgcatgttagaacatctttatgactttatcagtttagaacttatgagaatctctccaaattaaaataataatatattttatttagtttaatttattatttaacttttatttgtttataatatttaaactaattattaataagttttgagagagtttccgagagcctctcgtttcatatatgttttctaacctttttaggtgagactccgttgaagatgtctttatatacttatacaattttagttcccatattgctattttccaatacactatataatgttttttttttatcaaacttaaagttcttaattataatcctttatcttttggaaaattggaattacttcatttttctactatactttctcaacatgtaccttttcaaactgatttcgatatatgcaatacccggaagaaaaagttaaacaaaagacttcaagctgaaaaaatgtaaattcatcaaaataagtaattttcgccacaaacataatataaaaaaaaatgataggaacataaatatttgatatgcaagttatagaaaaagctgggcttatatacaaagtatctacaatctaaaaacaagagtttgacctaaactatatttgctaatacgatgatggcccaatagggtccaatatagtaggaacctaaatatttgatgtgcaagttatagaaaaggcaaacttcggccgacaaggatttagggtttactttacagttttataaatatgccagtataaaaaaacaaagaaaaagcaaagcaaagttatatgcccatgagtccttgactatcagaaactaattagagaatagagatggcatcgttgagaaaaagagagaaatcgaagagaagaaaagtcaatgatgcattaagagaaacaaatatcattgatgatttacctgagagcttgctcttggcttagattttctccaagctacgtaaccttagagatgttattctatgcaaaagcgtgagcaaacgatggaagtctctgttatcttcttcttcttctttccacaacactccgagcttggctttaatccttagtacaaatcctcagtgtgctacaaacgacatatgcttagagagtgggaaaggattcaagttaaggagctatcttgatcccgagtttgattctccggtttctgttctagcctcctacaaagatctcttgctatgcatgaagaaagcacattcatggtctagcacgccaacacaactctacattgtgaatcacgtgacaatgcaatggacccgtcttcctaaatgtggcaataggattaagatcgaacactttcctagccggttatcatggaagagcaggtactatgttgtcatgatgctggaatctacaccttctatgcttcgacttggcgtgttcgattctgagttcggtaactggaactttaattttttggagtatccgccttggtcacaatctggattgcttctaacgcaatcccaactcccaagccttgactgacgttcaatggagttgtacattggttagccgagaaggggcctatcgtagcttaaaaccgtaactataagcaagatatgacattcatgcatcgtttacaactcatcaactgttcccaagagatgcgtcatgcttattatggtggcaaagctgctgttacagagaccttaaccgtctgcatgggccatctacgcatcattcagctcgtttgccgtttcccggtgactcggtgagtaactaaaaatctgtatatattgaaacaaatctaatagtcagagattatcataaattaatgttaattttctctctacatttttagatgatcatcaccgtctctctatttggacactcgtggattacagaatatcatgttatatattgcatatgatttcattctttttttaaaaaggtcaaacttttttacaagattcggaattaagcattgagtaggttagggcctacgaaaaattcaaaaaaggtattctcttatttatatgatagtagaataagtaatttcttgaaatcctgtatttagacatttaaaaaatattttcttttgaatttctaaaagatctcacgaatttaacctcaaaatttggtaacttttatctattaatcttaaaatatcaaaattttagtttataaacttttgatcgcttcaaatttactatttatgtgcaatgagataaaatatttgtttcaaacttttcaatattcttttgttaatgtggaaaatgataagttctaaattaaaaatataaaaccgttgatcggtttaaaaaatcaaacataaccgactggtataaaccagcaccgatcagttacagtaactttattcactcgttgaagatgttacgctgaccaggacccctctgagtcttctctagcttgtaattttgctttgtgctaccactatcggagcctgtaaagtcagtttctagtggtgagcggtgtagtcttacccgcatagtctcactgaaaaattttcaatccaaattttaaaaataatttacaaagttttaaatcgatagataaaataaattgaatattaattgctaaataaaaatatctttttattatttatttttttaacgcaaaattttgaatagtggtatagataaaatatggagggtttatttaatttttgttaaatttaatttttgcattaatagataatgcatgacatatacatttctcaaaatggtattactacttaaataataaagatttaaaaagggaaaaaaaaatttgacccaaatatatttttttggtcaacttactatatatgacattgatgactgagagtattcagcaactgttatataggttttacgactataaataaagagtctttcactctattttcttaacacataaaaaccaaaatttaaaagaagaagagatggcgatgatgaaggtaatgttgatggtggtgatgatgatggtcttggttggaaccataatagtaataggtgaagagtcacatgcggattgtttgaaacggtgtcagcaactgtgcgttgataagcctttggataagaattgcgtccgccaatgcgtcttttttaattgcggtcctcctgctcttcctaccaatgttcatcattctaagtatagtattcttttttcttctatacctttggtttatcgtcttatcgataataaaatttaattatgtatatgctaaaactgacatggtttttcatttttttgtgatttctagcaggatgaaggctccacaaaatcatggaattagaggatagattattattgatttttagaccaaaaacatatagcttttaaagattaaaatgatatagagtttttgttcgtaagtcataaaacacttggatgtttagatgtgttcttggcatgtttgtttctacagatttttttttaatacatgaattcacagttcagttcggcggattttcagtttgagtttataaacaaaattaaattgatcagatgaaaatataccatatcaaatgtcaagttactaaatggtgcaaaatccaaagatacagtattagtggtgggtctatttgtgacctcttaaaaaaaaaataactcacttcattaatccattttaatcacacaaatgaaagatttacttatagtccactaactcactcagacgtacaaaaattaaccaccatctcttaaataagtcatatttatatcatccgttttattttcaaaatttcaaacaatctcaaatgacacacaaaaaattactatacaattgcgtgtattattcaaacatttgaccaatttgatatttaaaattaaacagaacattcaaactggtcaaatgcttgaatgtttgaacaatgcattcaaatgtgatgtttaaaatcacggctaataggaactaaaatccagatttagatcggtttgttgtccaaaacctcgaattgtcgaggcggcccattaaaaactagtgcactcgaattttcttcaggtattttcactttgacgcgcacacacactttacatcaccacatcagcatgtaatcaattaaaacccacatccatcaatcatcattacctaaaatttgctaaattaaacttcaactgtttctccattttgtttgccgccaggctacgctattgaacttcaattgtccagttagatttgtttctcttctagcataatctcatgcatgtacatttatatatgtgtactctggcaactgactttttttcttctttctaaccttcaatataaatattatatgaaacttgaaagtaattatatatatcaaaagaaatctaattagaaccattataagtaataaagaaaaatgttgacaaaaacaaacttgcaaaagtaataaagaaaattttaatatttttaattatagtctagtcaaactttaaattaatgattttaacttttctggacattagttttatatatactacacacacacctatgacaaaaaagacatgtatacgtaaacatacacttacagggaaaaaattaaaggaaagaaactaaaaaaaaatggagatgaagaaatgtagtatgatcatgatgataatgatgatggtggtgatggcatccatacgaggaggagaagcaattataataagaacaacatgcaagcaaatgtgcatcgaccaatgtggtggccgcatcactgtccctgagaccccttgtctccgtaaatgtcttcacgaaaaatgtggctttccagctcctccgtaataattcgtaacctcgtatatatttacgtatattgatcaagtataccttttaatttgtgttgactaataatttatatttatcgcgacattgcaggatggaggctgtaggaatggaaaacctcataggatagatcctcatatcctcagtttacttttcataagttattgttgtggaaggaaagaattacaataattaagagtaatgaacaaaaactcagtttacttttcataagaaattttgatgtgtacaatgattttttcctatgatcataaagatttccgaggccaaaattagggtcaacattcattcatattggatttgaaccttattttgatccttataaagactttcttcgatcgatttacttcatccatattttatggccctttctccttcgacaacaacgcattaattctcaggacgggtgcgttgcaatgtaaaaagttctttcgaaatatttcatccgattagttttcctcaaaagtattagtttcaattaaattaaagataatagcctaattataagataatagcttaattataaagccagccagattacttcaagttgaagtaatcaagcaaactatctaacactgataattcgtttaagctccgatgctatatatctagcacatggttaatgctataacaagttaacaccctctgcatggtccaatatctataaaaattctaaacagaacaaattaatgtacaaacacagaacaaaataatgtacaaaacacatttttgtcccttttgcttacttacacagtaaactcattgtcttatctactcattacaggttttattgaattaattatcaaaaacatacgcacccatttctactgatatatagtgaaaatactctaatttattattttaaaaaaaaaaacactttgcaggtctaaagtgagctagggacgtgaaaaaactgaaaatacatattgaaactagacgaaggaattgttatgttcaatatgtatttagtgttaattaaaagactagttgcttgaaggaagagaagacatgcaatgatgcaatgcagaaaacgtagttaatgcattaaaagagtctttgactctctaaagtgtaaccgtagtattcggttttgtcagctccttcggctaactaattaaaatcctaacggttcaattttcaacctttcacacactattcaatattactattttccgaaaaattggtatgataaaaataatattattgtaactatattgtaagtaagggttttgatttagagcgattaaaaatgttataaatcaaaatagtgattgatgccaaacgcgtattaaatcaaacgtttgccgatgactgaactactttcggtaaacgagaaaccagacaaatgggcctgtctcagaatagccttttaaggagcccaataaatttggacgtagcacgatatgaaaacgccatcgttttaaagttctcatcacgatggttcgcgttttgaagcatattttcgaaactcgaatcaaaattcaaatggcgggctaaacttcgattcagtctctctctttctctctttggtgatggaacaaattagcaacatcgctggtggagacacaacgaaagagactatggcgtctctgggtctcatctgtgagaaagatattcatgaacagcgtcttaaaatcgattctttcatcgcttctcctttccggagatcgatgaactctttagtggagcgagctcaagccactgctcaaagccaaggtaaaattcaaaattcgcatagtaccactcagttccgtatgacccagatcgtaaatttcacacttttttacggtttaggctctgtctctctgaaattagggttttaaaatttcgacatcagactggtaaaattgagcggttctgtgaaatgtttctttgattttacagtggaactaatgaatttgaaagcggatctgagagaagcagaggatgagctagttaaagtgttggcaggtattattacctcaaaagcttgaaactttgaacttagtttcttaaatcataagattctccttggtgttattttcatgcttacatacattgttttgctgagtttggatatcttactgtctttgggatgttatatgtttgatgtttagtgaaaacccgtaaagaggcacggcaaatggggataagagattccatttctgcaacacaatctaggattgaagtacttagaagaaatttgcagctacagaagtcaaagaaggatgattctgtgagaattatctcccaacagttgcaaggtatcgttatataattctgaagttcattatacatacaagtttcatgagtcagctacatgctttgggattttgtaaagtgaagatatctataaaaagtactctgcttgtttcaataagagatcacatgaatcactgaagaccaagctaacatatttcttccaataaagccttgtcaaaatcgaaggacaacgctggtaaagtcaccgaagacaaagcagatattcatgaagcaatctcttggtataatcatgctctcggttttcacgttgaagctggacatggtaatagagacattttgagtttgtaacaatcttagttctatattactaaaccttagccctaaaagagctttgttgttttaacttctcttacaggagttaaattcacattcaccaacattgatgcaaaaaggccgacccgcgaattttcgttcacagttcactatggaaatgacatctacacacgtgagtatatatatgtcttcttgaagcaagcatcaactacattataatgtttacaaaaaaacctagtaatatgaactgtttacagtcgtttacttatatgatcatcagtattggatagcgatctgcaattggattacatcaacgagatggttcaagaattgaataaaaccaatgaccttttcagatttgttcgtctgatgagggagcagtttctgaaatccactttatctggtaaattgtctcaagcctatccttttataacctctatctccataagtgagaaatcttattttcgatatatataaaagttgaatatgaccaagacttgtgttttattggattttgtcagagctgccaacacattcaggacaactgcaacaggaaacgtctgccatatctgcttcagctccagctatatcattttccactgatacaaacatgtcaactccagaaaacaaaagatctaaggttcaagtgaatcggcgacaaaaaagaggtagcgaatcaccactcctagctcctgtatccacatctgccactcgccgttcttctcgctttaaggtactggatactcattgtgttcttaaatgttacaacaccaaaccaaattcaaaatatttgttagatactatagtttccaaaagtaggataccagaacctatttgcataacaactggacataataatgttctatctgattaataatacttaactgatcacatggagcctatagtatttaacatacaacttatatagcaactctaacttgttacagggtaagaaatgaaggtggagctctgttttccttttcacaagcatcaaggaataaacttaagcgtagatgatgctgcggaactttcgacaacaacagattgttgtttgaaattcctataaatattagaatgtcattgtaatcacgcttattgacaatgttgatttctttactagtgtggatgctatgcttatacaccaatcgatgatggagcttgtgggactagattttaatcgatgtaatctcgcgcttctctatttctagatttcgttagctaatggatgcttgtctagcttcattaagattgcgcattagagataatgatggatacttgagccatagattgtgcattagagatgtacagtttatgcaattttaaaactaaaaatatagccacaaccatattttctatcttaaattagacaagaaaacaaatcaaacaccattctccaactcgttgttcctcttgaaacgactcttcacctcgctcatgaaggcgaagaagggatttggtgtagccaacgcgggagaacgaacatggaaaagtataagtgataaaggtcttccaacatgttacaatccccagcaaaactcagagtttgataatctttgcaacattccaagctgttgtgaagcccgaacttgtctttacgcaaattagtagaccccaaacatgaatgcatcttgcaccacatgtacattgtattagcatcaaaagggtttattgccagcggaatgtaatcaaaaccagtctcactacaagctagagatatttcagatactatttcccattcccggctctttagcctccatacacgtaacttatgctctacatgtgcatcatctttgtcttgggagaagatgttcatgtacatgatatatccttgagatgttgtgcaaactcattttaaatttggtggtttcgttccaccgtcagggaaaggtgtaacttggcatcgatcagattccgtgccagtcgcgtagaaatcatggaacacaacaacctctccatagtcgttgttgtagcctatccagtaaaggtttccatacaagctaacagggttgtaatctatcagaccagacaaagtgagatgagattggagggttttgaaactccataaccctgtctcggatgaatatatcagtaaacttatgacatcgtccaagttacttgtatccatcaaaacaactttgtaacctaaaacgacgtgatcctcaagttttgtgacaagcccagaggttaaaaaataaccaactgttggaggaggctgagggatttcgacacattgtcttgagatcggattagccacatagtaagttagtaatttgttgccagagctgatcaaaatcaatccaacatgagtgtaagccacggcgagtgtaacgtttgggaattgagtattgaatttgtgggttatgaaagaagagatgtaagaacttagagatcgtggaagaccccaagtttcgcattcgtagtgagccacgactacttcaggtaggactctgcagaggattgaccatgaagaatgagagttttgatggtgggtgttgaaaagtttgcggaaaaacggagattctacgagcgatttccattgcttgcaaactagttttgaagtggtgatgattgttagtggtaatctcgcaagtataattgcccatagatcatctgttaagaaaatcaaatcatctccttcttcttcttattctctgtctccatcccaattgagttttgagtacacgactttactctgttcaattaaagttatcaatgtatattttaatgattttttttttctttgtaatattaacaatattgttgaatcaatacaattaaactaaaatccatgtctctccaaacctgacacctaagcaaaacttggagaagaaaattatacttttacattcgaattggtttgttagttttaatttttattagttatgagttttgaggaagatttctaggtttttgttttggctctcttactgtgaaattgagatggattttgagataagccatgatgtgtttcaaacttgaagttactttgaatattggtgcagagaagagtaatgagttgtacgtagaagagtctagaagtctctaattcagcgcattgtttgctcttctccttcacgcttcttctcgcattgaagcttgatcatgttgtttctcagtcatggtggttagttttttcttcttaagttgtggcctgatttttgttttctattgggaaaggtttgaatttatcgactgaattctcaattatgcaaattctcttcttgttaacccaatttctgtttaaaaattggatatttgagttttataagaactgtgattatctaaaagtcaaactctttcttgttagaatttgagtccatgattaaatcttatgatagatatatgttagttcgtgtgtaaagtgtttgagttaaccatgacttgttatgaaagggtgtgagtaagagttgtgacttgttggataagacacaactgttacgatcgggtaggttttgtcatgaagaaaactatataagtgcaagtgttgtcctagtgtaaagttgtcgagaaaccaacaagtttcagattcaacaaagagtaattttgttcttgtcttctttacaagagaagagacaaatgtctcttgctctgtttttatttttttctctcaatattccaacatttcttagttttatcaatttgattgtttaattgtgttatataatctactttatggttttatacttttatggattattgattttcctatcttccagggagtttttggttttggagtagtctttttcatttactgatgttcgcacgcacaaccattaattaaaggtaacgatcgtcatggttttagattggcattcaaagaattgttattgagtgaaaggaaatttggtagctatgccgcgggtattttttggaaactataaatcgttgtcaatttttgtatgtaagtgtatacacaatatttcacgtaatgtatccaaactcttgacgttataccacttgaatgacatggatttgttgcatttgtctaaaaacagatgcagttttaagcaagccagaacaaaatcttctaccccgagaaaccgtattctcggaagattacatcgtgcatcctcaaaactcatgttaacatggtaaagccaaaatcattttctaaaaaattaattgaaataggctaaaaggtttgctgcagaaatctaaaaacaatttcaattgttcaaactgaatcattcgtctaatgcattattatgcaagttaagcaataaataagaacaaaatgctgaccctgagaacattaaaattatgacctggcttttcagaaccatgttttattgattttgggtagttgcagtatgctacattattaatgttgaaaatggtttgtaaattttgttatgctcatatatattttatctattttatttatgttatataatgggttaaaacgctttatatagtttgattgattacagtttggaaagtctctttatttgaactttaaaggcatgtataaatttctttgtctacctattactttgtttgcaaaaacacctaattatcatgctatgtcgtttgataaggactttgtgcttatttaaagtaaatgtaacccacagcccacagacatgaaaaatggacaaagtactcatagtttaggcacgtgagtgatgtttgaataatatcttgcaaaagaaagttaaaatgaaacagaacgtattttgtaatcatatgaaaagaaaagtaaggaattttccattactctctctcacttctctctctctaattctcaccaagaacccagaattgagaataagaatctatagatcattatgctcacctctctgctcttgtttaagtgatgagctgaatctaacaaacgttcacacgtgttaacacccacacgtgcgacttcttctttattctcttcaaagcctcttcttgaactagaagtttcttttgaacatgtatagtccaaatactctagttgctttagagtcattgccaaacttgaacttgttttatccttcttctctttcattagcttgagcaagctgaagcttctttgtgctttctccaagctccactttaaagttgaatcatactcaaacatttactgacagaggactgattcatagaatatttaacatcataaggtagttttgctactgacatcaaatttttatctttcagttgagttttgattacagtcatgtttgtgtttctgagagcaaaacttggagaagaaaattatttttattgtttttattttcattcgatgtcgttattgtttaaagtctctaacaatctctagatccacagatgatcttctcaataataatggcggttcttttggcccaagcttcaagtttgccaaagaagactgtccaggtgatttcaatatgatagggactagggatcaaatatatataatacataatacatgatacggaagtgtaatactattgatatatttattaaaatcccaaactaattaactcttgatatataacagcatgtgtaacactaaaaatatattgatagttacgtttgtttcaaaatcaattacagagttcggatggggatattgtagactgcttcgacgtgagagatcagccttcattggatcacccactattgcagaatcatgaaattcaggttatttttttttctttctaaattcggtttaggtaaaactgtaataactttaaaacagtgacgttttttacgttcctaatgtatttgtcgtattatactcatattttattatcttgttctaatttttgtttgtttgttttttcattcaaattaagggcgcacccgccacaggattaccatatatgatcaacaaagcgggaaaaagaagagtttggcaggtttggaaccaaaacggcaccagctgtcctgacgaaactatacccataagacgtagcgtggtcggggctaaaagatttaagaaaaaacattggacagatgttcgagtcaatcgccgaacagttccatacgccgctgaggagggacacgaggttacttttttaataaatatatcaatatacacatgctgttatttttttatgttggactttgaattcatttgaccttttagttttggtttaatttgatgtcaataatagtacgcgattggagaggtggtatatctgcggggaatatatggaacagtggcaactatgaacgtttggaatccatctgtagaacatggaacaaacgaatttagtttgtcccaaatttggctcgtcgctggacattacaacgattccgacctcaacacagtcgaggctggttggcaggtaattttactgcttcttttcttctctctcttttttttttctctatattatgatcacaattgttcgtttactgcaaagatggacaaatgagtaaaattagtttttgattttcccattgtttaggttttcccggatcattatcatgacagccagccacgacttttcgtctattggacggtatatagcttgcactttctttccttgatttaataatagtaataatatagagtaaagctagcagatagtatatatatataatatatatgcacacatttgttatgttattttttaatagttatcaggaattgcaggataaagaatcttaactaatgacgaattgtgtccctcactattttatgttctactcttaacaaatgaacaatgaactagacacacacacacgatattgttcggtcgaaaggtgcggttcggctagtaaaaaatgggaatcataattgattcgctgacacttgaccgaactgatgcgtatgctacctctcgatcaaacggtaaaaaaaaaataaagaacaattaactggacatttattaagacaaaaggcatatatactttatacgaacaataaaacttttgtgatatacggtaaacactaaagttgtatctcatgtccctttcaaatatgctaaaatattatgaacttgtattatagatacttctaatcagtcttgttatgattatgaaaataatgtgtaatcttgtagaaggacacatatcagaagacagggtgtctcaacctcgagtgccctggttttgttcaagtcactagcgagtttgccattggcagtgcattctctcctacatcttcttacggcggcagccagtacgacatcacgatgtacatatggaaggtatgctcggcccctgaaagttagtggtcacttgcttttttgtgattttttgtaatattttgttttcattgtaggatactaaagatggcaactggtggctgagcattgactcctcagtgattgggtattggccggcgaggcttttcacgcatttagctcacgggccggcgacgttggtacagtggggaggcgagattgtaaactctcgcagctatggccagcacactaccacacagatgggctcgggacattttgcagaggaaggcttcggcaaagcaggtagcttccgaaacctgaaaattattgactacctctcgtacatgcaaccagtccaagagttcatcctgcaaacgaagaaccccacatgttatactgccataaagggatacagcgaggagtgggggagtcatttctactacggcggaccgggatataacgccctgtgtccatagtgtttggacattaggataaacttatttctttatgatatatgataaaactagagtttggagtgtttaatgacgttaaataaaaaactagagtttggatttcataacatttggcttagaagccatgaccaatcttccaaactataactcttcttacgatattgacttaataagtatacaaggatataaaaatgtgtatgccaatataatcaaatcggaattatggtttagattaagaaaatatgcgatgtaaagatggtcttttatttcatggcatttttataataagagaaactacatggtggttctcatagttatagataaaagttttaatagaccatagtacggatcatcagttttaattaataacaacaacattttttaggttgagaaggagacacagtataacattctcctgccgggtaccccgatgataggcagtccacattgcatttatgatcatcataataagatgtacatgtattaaagcattctaggccattgatctttgctttgatctctgcacatacatacacaaactccagataaatttaactataacacgcacatatatttacaacatgccaaattatatttttgataattcatattctttgataatctctcaaaattctccatgctatatatcgcttttaaaaatttatatgatcaaagctagctaaataatgtagtggcaatcatcataatattcttaaaaatacctgatgctatagcgttttgtggggacgacgaaataaccaataaacctacaagaaagaaggtcactaagatttttgtgaaacccattcttttcttattttttttggttttgaagtctattgaagaaaaacggtgtacaatttttagatcttaaacaagccctatttatagaactattactctttgaattgaactcataaatcccaaaaaatctcattataccactaattcctaacttttgccataaagagttctttcatatttgtcaacatcagattttgtgtgaaaaagttttgaataagcattaacataaaaatattgggattgaccacgtattatttacttccaaaataaactttttctttgtttttgaatatttttggttttgctataattagcctttcatatttgttaacaatatataaacattattgtatatatttgtataaacaataattttatcaaattattagctagtgaaatatcataaaagtttacatcttttctttgataaagatgataaaagtagacctaaaactgcagcttttattttcccaaaaatctcagtattctccttaacaaaaaaaaaatctcagtatttatacgactttttatatttcttaccatagatagttctttcatatttgtcaacaaaatcatatttttgggtaaactaaatatcttgggtccaaacacgtatcatttgacttccagaaaacaatagatcgaatgatacgtgtttcctcaatcggaataaatacaagttgactaaattttaaaaggctaaaaaaatagacaacgacaaaaaatgattttcgatatccggatgcatgtttggatgtgggattgtttttggaagatgggatttgcattttcgaatgatacatgtttcctcaatcgaaaatatatagttgactacatttgaaaggcttagaaatagacaacaacaacaacaaaaatgattttcaatatccggatgcatgtttgtatgtaggagaagttagaagcgttttttgaacattataaacccatatgactttatattttaaaaattcggatgcatgtttaattcttgtacttaatcatacccacaaaattatttcaaactttaacctaataaccctaactaagcaagttattttcacaaaatatttttgttgtatgggcgaaatttagaattggtttttattccgtctaagattaaaattacaaaacagagcaaacctcaagaatccaaaagcagagctattgtatgtcacgggctactgaatttggttgtggtgacgaagccaaaattacagtgactggaaacattagtatgatcaatctgatcaagattataacggtagaatgctcacttagctgattgctaaaatggccgcagtataatctaaccataattcaaacttctcaatattcaaatctctgagactacggacgtccataaaatacagttgaattctgaggttgtacggttatacatcattggaaggaaataagctctagcatggatgaaagctaatcccgtctaatgccttgctatccaagctccactacaaaaaagaattgaaattgatccatgaggaatggacactgcatttaaggattcccatacgtagttttgccaattctcccagagcttagatgtaactgatgcaaagtaaaatatataaattttgtactaaatgaaatcccaatgaaattattgcgtgcacaatccatttttcgttatttccaaaattacttacaacatcaaactttgaaatatttagagatgtcaaattttgtttgaaccatctctttatataatcttaatatgttatttgttataaggatcataagagtaaccctaatggtaagggaccgtgagggtctcttccaaaccttttaatcataaattttgaaaattttaagtttaagagtttcagttggtcccttaattttttattcgtccaatggtagagcccttaagtgggtttcttaaaaaaaaaattattattaaattaaaaataacaaatattttaaatggatcgcatcttctttgaaatcgttccataactggatgtgttccagttcacgatctctttcaatatatgctcgttttgttgttgacttggttggttgaagatcaatatatcgatgtaatgtttcaaaaaattgatcaaacgctggaatgttggttgacgatcaatatatcgctggtctaactctttctatcatataatatattacatttagtctgctgcattctataaatatttttaaaataactgtttaaaaaaattaagttagagtatttataattttatcttgttaatattttttatatttatgatattgtttgaaaatgtcaagtaaaactattttcaaatgttccaaattaaatattttaaaattctattgtattatatttatacatttcagaaagacaaatatatgaaattcaacttcttatatgttacttagtctaaacttttgttgaatttctttttgtttaaaagaaatattttactcaattctgaatttttgacccgttataatttttctccataaaataccatcaaatgaaaatttaaaagtgtaaattaactcatgttattaaagacaaaacaagtataatgattaataacaaattaatatggtaagttagatatcacatcttatatgttaattttgattggttcttcttttaaaaaataaataaatttattattttcgtttttataatcaaattaaattaattaatttatataaattagtatttgacttctttaggggagagggatatcgaatcttgcaatataaatctacaagaaaaaaaagttagaagacaggaccgtcccaatccacatctacgttgaagcccttgagattaaattttattacatctttttagtattttatttaaataattagttatttttaaaaaagttttttaaataattagtttagaggtaattagttaagatggtttatttatggaatgtataatattagggtttactacaaaaagttttcaaatcttcagtttttgtaactttatccattatctataaaaatgtaggcaattctaagaaataaaatataagactcaatattgtaactccatacgaaactttttaaatgattatgaactctttcttgttaggattgtttttttactatttatcaaaaaattataaacatgacttattttttattttgtggaattaatctttagtttttgaaaattaagaataaaattgcaaaaaatagagatctggtaccctaatatatagtcaaaggtcctccaatgaaaataaaaaagaggtgatcaaaaattattttctgtagttttattaaatatatacaaaaattaaggcataactcaactactaactgtcaaaacatttgtttttcaaaaacattgatgaacatcatttttaatcgtaaactagtcgttaacggctacgttacgactatatttacgactatttgatttcctgactctcaatttacgattatactgtttaatcgtaatgtggtggtaaacaaccatttaacgactatataacgattacttttgtaggcggaaacactctgttttcttgttgtgctttttatgtacaagtttgtaaaacaactcacaaaaaggtgatactaagcatgaagaagccgtctcgtatgagacacattagcattggcattatcagataaaatgccaatcctcgtcagagtctcaaattttgtgtaacttgtctcttctccatgtccacttccgcctacagatatgagatatgaatcttataaaagcctcacatgcaaaaagtaactaaggaaaagggagagataaaacaacattgaatgaatgattgtaactatagtaccggttctgtggcttccctgattggtggagtgtcttcactaggcacgtgtattagttgtgaaagttgtcgtagtaacccattcctgtaattgaaggcacaaataagtttttttttttttgaaggtacaagtaaggtactccataatcagataagagaatgacgaggaacaccaaagaggtttagaaagaaaaagttacctttataatctcaataactcttggtgtattaaaatccagcagaaagtttggcttataatggaactcattgactttgagttcgtcttcaaattgttatccagactcacttttagcgaaggttcttcacttaaaaaaaaaaatatgaatcattaattcactcaggcccggctcacatgggtaggacggaggtgcgaccgccaatttgtgtgtaattaaaattttaggtttaattttttcttcttttctgggtttgctttactaatctctctcctttaacggtcacacgatactattttatgaatctgtatttttttttgctttctcaaatctcaataaattcttaacatacaaaaaaaaaagagaaccagaatcgatgctcaatcatcttgattcttgtggctgcaaccactaattgtaacttcgtaagttttgaatcaagcaaaaagaacagaacttgaagtagatctaaattttgtctttcttcgaacacttagtatattcttaatttattggttaatcgttttctttatgaattgtttattgttctaggtgcttccacttgaattatcgtgacatcaattcttgttaattgcaattaccaccgctcactgcctcgactttgttaatccaggtgctattttgacttttgatcatggttttgtgtggagatgacaaagtaaagaaaagaaaaagatatgcattatttattcaatctcaaagaggggctatggataaatttgttaaaaaagaggtgataatgctagtgtttctcaacaaaccgaaaacgtgaatgatttaaatgatggttccaaacttccaataataatgttccaaatgcatttgaaagttttaatgttcatgagcaagaaaatatttccttgagtatcgataatgatcctaatagattgagtgagcatgataatgtgtcaaatgcatctttacatgaaagtttgaatggtaatgaacaacaaagatttcagtttaatacttttgatcctagacattgggaaaatcttgataataaaacgagagatgagttagttgcatgtggacctaaaagagaatttaatttgacttttcctcttgataagtattatagacatttctcatatcaatattattctagaaaattgagtaatggagaaacttgtgatagaaagtgattagtttattcgaaacatgtgaataaagtttattgtttttgttgcaagttgtttacttaagtgtgctagcaaatgatggattaaatgattggaagcatcttagcgagagacttaaaaagcatgagataagtgtagaacatatggctaacatgaaaacttggaatgaaatgctagttagattagagacaagtcaaactattgataaagaattacaaagagaagttagaaaagagaaagaaaggtggaggcttgttttgattagaattattgcggttatgaattgtcttgctaaacaaaatttagcttttcgtgggtcaaatgagaaactttaccaagacagaaatagtaatttcttagatatgattaaatccatagctgaattgatgtaacaatgcaagatcacattaggcgcattcattctcgtgaaatacatcatcattatattggtcataatattcaaagtgaattgatatctcttttggctcataaagttcaattttctattaagaatgtcataacagaggcccaaatatttctcaatcattcttgattgtatcccggatgtaagccatcaagaacaaatgactttaataatatgatgtgtaagaatggtagatagaaaagtgaaagtagaagattactttttagagtttcttatcgtagatgatacatccggattaggtctttttgaaagaataattgatgcgctaaaatctctagatcataatgttagaaatgtgagaggtcaaggttatgataatgggtctaatatgaaaggaaagcatcaaagggttcaaaagagattgcttgacattaactcaaaagcattatatatgccttgtgcttgtcatagtctaaatcttttagtaagtgatatggctcattcttgtgtgaaagctaattcttttttggagcattgcaacgaataatatatgtattattttctagctctacaaaaaggtggaaaattttgcttgatcatgttccttacttaactatgaaatcattttctaatactcgatgggaaagtcgaataaaaagtgtcaaagctattaggtttcaagctcctcaagtgagattagctttaattgatctatatgaatcatgtggtgatgccataacaaatagtgaaacggaaagtttagtgaattcacttgaggattatgagtttttacttggtatgagtacatggtatgaaattttgtttgtcataaacaaggtaagcaagagcttacaatccaaatctatatacattgatagtgctgtaaaacaattagaaggtataatcttatactttaaaaagtatagagatgaaggatttagtgcttctctgaaagtagctcaaggtctttcccatgatatgaatgttgatcctatatttccaagtaggcgtcgtgtctttagaaaaaacactttgatgagaatgatcatgatgaagaagcattatcggttgaagatgattttagagtcaattattttcttgttgttgtggatatggcaatttcttcggtaaagaatagttttgaacaaatgatgacttttaaaagtgtatttggatttttgtttgatttattgaaattaaaatcacttgatgaaggtgaattaaaagagcattgcattatttttcacaaaacattttctcatgagaatgtctcggatattgatttaaatgatctttttcggaattaaaagttttgcaaatgactttataccaagtgtcaatgacacctagtgaagtgcctgagtttgtagaaaatgtaggatgttatcccaatgtttcaatcgcttatcgaatcctattaacaacacccgtgacggtggcttagaccgagagaagcttctcaaaattgaagttattaaaaaattatatgaggtcctctatgtctcaacaaaggttgaatggtctagttattctatgcattgaaaaagttagtgatgaggacataaattcaaactgtactgaagttactcgggttccgacaatgtatcaaccgcctagaacaaggtccggttcaaagacgatgcgggaagaattcaacaaagctgtggagagtttgataacctatagagaaatggaaaacaccatcaatcaattcgataatctcactctttgtagtaacaagcttaaagaacaagaaacggagtcaacggagcaacaagttacggttacaactcaagacttaagtgttgcccaagcttttgtgatccaacaagtgaaaggcctctccttaagacaaacgaagcccatgttctctttgtcatcactccaagggacgccatttaaggaatgtccgtagtggacgcttccaaggtcgtgagcttcctctccaaactaaggtatgcatttaaatcttctaattagctgtcaactttcctttcttttgcaggttgggttgaaattagtctaagtttattttgtcatttatttctcaattatttgttgcctttttcttctctttttcaagacccttgaaggtcaacgctgtcgacatattaataaggtccattgcagccattgtagttcatatttttgcttattatcaataaagagagaattttctttaaagtgtttacgagttcaccggtcttgtgcggcttcccccttgatcgtgagttctttgacttattacaatctcatcatcgattgtgtggcgtcttcgatccattccacctattagctgaaccaaagagaaccgtgtggtcctttgtaccggctccgccatctacgtagagagtatcgtgtggtcatctacttggatcttatatcagttagttagaaagcatagactttgacactgtcattcatgactttgcgttgactagagttcgtcaaaagcgtttctttatttcaaattaactattgtgttttattttgttgttttagatccaatagaagaggatgcataagatatgaagcaatttaaagtaatgtggtattgataaatgaagatatagaacttaaaacatgattatatgaaatggtttttgttttagcatgcttgaaaaaactcctttttgtaagttgccgtaaggcttctcgattgtttgagccgggactaaatttacatgaaaagatttggtttcgagaaagtgtatcaatgaatcgacgacattaatacataattaattacagccaataaatatgagccacttaacttcaaaaatacacaaaactcgatttctttgcgtaatgcgaggagaattaaaagagtattgggttattaataacaaaattgtccaaaacagccttgtgatgtccaacaaaggaacgaatattttcatttccctgtccaacaatgacgtcatttcctacctataaataagttccactcgtcccccagaattctcggtttaagagaaaaagaaaccaaaaggcaaaaaagacacagaaaattttgaaacctagaagcttctaacaatggtggccgtagctgagaatcagaaaacgaagaacagtctcaagttcctctgcagttacggcggaagaatcctccctcgttctatcgatggaaagctccgttacgtcggcggtttcaccagagtactctccgttcatcactctatctctttcacaggtccgtttcaatctttttccccccattccaatttcatctaacttttccaattcatcgaaattgatttttctacttctccttcagaattgacgatgaagttggaggaattttgtggatactccgttgaattgaagtgtcaattaccaaatggagatctcgagacactaatctccgtcaaatcggacgaagatctggtgaatatcgttgaagaatatgatcgtgtttacggaggcaagatccgtgcgattttgtcgcctcctaagcagatgtcaccacgatctagcggcggcggtggagatctatcgccgaaatcgccgttctccgtcgtggcttctccatctccgcctcggtattgtgtggctccgccgacggagaatcttctcagtagattccgtatgagaactggagaatactctcgttgctgtaactgccgtgttccaaacagagactccaagcttatctggcaataacgtcagacggagaaataaaaatggcttagaaaaaataaatgtgaaaaaatgaaatctagggttttatgatgtgttgttgtatgtgaagagaaggaattatgaaaattagtgaaattttgtggtcggtgaacaaacggagaagttgacggaatattttcccggcggttattaaccgttaactttgccgttaagatatgtgggcaacgtacgacgtcagttttattcaatacgtggtatgttgcgactgttccagacgtgaaacgtgtcgtagtcagatgcgagtacacgtgtgtattgtggggatcagtggatgtgtatcctcacacgtgtacctctgttagagtttcttattttgtttcctcagcagaggttttgctctccattcattgtttttgtattttgctaaactttcattttgtttttgtttgtatattatatagatttatattgtacattattttattttattttgtcttattttatgggtctagtcaggatgacatatatccaactaagtttttattttcccaagaaaaagaacaaaaaaaaacagggaattatatatagatcccaaaaactattaattattaaatcccacactcatagacaaaaaaaaataaatttttttttttttgatagattgtcaagtgaccaaagatcgtaagaacgcaattaagatcttaacaatatgaatgcataaacactgagggagactgttttctgaagaagaattaatcaaaattttattttgttaacaatatgttaaaatttgatttgaccatttctcaacaaatttgatttactcgacatcgttggatctaattgaagcaaatgtcttaatcatgtcactgtgtcactgagccaatcgatcttctaacctttacaagtaaaaatttggaaaaatagaaaatgtagggcaagtggacacttctctaactttggtgaatggttaaatgtcagcatcactatcactataacacacaagattagatacgtgaccgaaaaacctaagcatcaatagacagtttccatgtcaaaagtttattcctttgcatctttttcttaatcctgaattgctttttcatccagaatatccatctctgttttgttagtttacggtaaaatgctgtcatagggcttaaccagtttcgatccggctcggtttgatgaagattggttcaaatcaaaaccctattttcaaagtgtaaacctgatccgtccatataatgataaaacactaacgaacattattaagaccttaatgtttttttaggtagaaactaagaccttaattgtttcaaaaaccgttgtacaattttcatgacttgtctttgcaacgtatggtataagaaacaaagagaagttgatgtatcaaaagcaacaagaaaaaaaagtctagagaccaaaacacttggctgataattaaatacattgattgaagtgacattttatagtatgatgtctctttgtgagctctctcttcattcagctacttcaatcagagacagccgcatgtgtgaagaaggaacacgtaagcttaacagacttctggaacaaacctcacatggccaaagcagacaggtctggaggttaatattcggataagagttttctgacttttcatgtcgtctaatacttccaacaatgatcctcaataaagatgaaagcaaagagaaagattctaccaggacatgatcaagacctcaatccataattgcattctctgatgaaaataatgatatccattcaatactgagttgaagaaaacaagaaagagacagagaagctcaacaattgcaaaatgaataaataaatgcaaactgtttatgaacaatcctacaacatctttcagttccatcaacaaagcctacaaaatcatcttactaccctgcagcacgtagaacagaggaatggacattattcgcaaagagagtagagttttattccagagaggttgaatggaaagacttccaaacagtagatgacctcttggttgtattcttgtagctgaatgggatgaacatgtctctgcggaacaattgggtgacataatacctcaagctgcagcaccaaagagttcggagattttagggtgagttttaaagtgatggggacatatgaagagaagatttttcgcatcagtgagtcttccttctcgatagaaagctt

SEQ ID NO: 495 - DNA, 87011 bp, Arabidopsis thaliana
gtcgctgcgttgtttcaagaagtccttgtgtgacatcacctttagcaagtgtattagtaaccggtgggcactcaagaactgaaaattgtaagatccatcgaagacaacgtataggaaacactttccatagcaaaaatttgtcaacgaatattgacctgaaaaacaaattacacaattatttgcaaagtagactaaactgggaaaactcaatagacggcaaatctgtttccctttgaaaaaaaaacaaatcatagttccagttccatgctcacttctgtcgaaccgcattgtttcacagcattaggatggaaatgaaagaagaaaaaggggtatctaaagaaagaatcaagctgccatagaaaacattttgcttgcctcactgatgcctgatgtattacattgcgatgaaacaaagtccaaatagtccagaaagcttcaacatcacttggatgctcagcatatagctgatgtaaaagttgttcagccattttctcaacagcatacggatctgtcactgcttccatagttttcgaccaaatccgggttgtagggtccaactgaaatgtatccacctcaatagcacctatctttgagtttagtaacctcctaacttgagctaggacatgaggtgttacttcacttaacagcaaatctgcagattaaaaaatataatctaaagtacatcatgatttgtgtcatgaaaataacttcaataaataaacacaccatccagagattatcagtcaataacagagtgcaatgtagtttatattatggcacatccttttccccatcggtcatgatgatttgatctacattctcacaattcacaacttcccattacaagggacagaaaatgaatacaagcaagtccatggtaattcacaacacttagagaaacgaaaaaaataattcacaacactcagagaaacgaaaaaaatagagctgaaatacagttcgagaagcatatatacctgataatccacgtcgacagatgcgggaaaaaacttccccgacaaatgataaaacgataactgtgcaattggcctcagtgcaggaagccctgtcgtccaatatttgtagaagctgattggtaatgtgcttgaagtacaagctttatgactcatgtaaaggataaacactgacctcaaagaaattgataaaaataataaaaggtatctaattacttaggagaggataaaagagatcaaattgaaggcgttagagtctgtattcatagagaaaaggatacttagaagaaagtaaaggtggcgatttcaaccgtgctttatcaggaatggaggtcaagatctgtgatagcctggataataaaggcttgagacttccattgctagaattatgtccttgataaatattaccaatttctttagttatcttgagcactccatcattttcaagcaaacacaatataagcaatctgtcatttaagtaaaatcacatcaccacaggctaagagtatacaaatagttgcacgtgcttcagctacagtcaaaatatatcactggtcatagtgttataccgagataaattgtcaagatggagaattgctacttggtccattaagtaaagtgttatactgtctacatcttcagattttccagtggggtcaaatagaaaaggaattcttgggagatatattcagaagactcctatacatgactcaaatactcgaaaggtgaaaactttggtctacgctgacttgataaaatacacaagaaactaccaatggtgtaaaatgtcatgaagcagaaattgttgttgaagaatcatggatttatgcttaacatttcttaaacagaagctcaatggaaaagaacaaaggaaatagccaaaacagaagtgtgtttttgagtacctttccacattagtctggacagaattagcattaacgccaccatctcccacatgatgtagaaatggaaccaagacttgaacaacctcaataacagatccatctaagaagaacttatcatacaaatgtttctgcactgaaatagggaaacaagacagccaatccgaagcaacatctggaataaaacaagaattagttaaacataatttccaaattgcaacaattgatacaactcaaattaacaagggctaagaaaatcacacaaacataatcacaaaaatgtagatttgacaaaagcttaccaagcaacaaaactcgagcaaacgttggaaacgcaacacctcgatagaacgtctccaaccattcatttctctcatctgcagaaggaactacagagctacagacctgtgcggagcccaaatagagaatcataagtaagccaaaagttcctgaaccacgaacaatgtggagcatttcaaaatttccttaaaaatacaaaccctttctctgtacttgtccccaatactccctgcaattgaattggaaatatcaacaaatttcgtaacgaaaaaacagcccaaaaactgaacttttgaattgagaagggactgaggtgaaataagaatagatgaacaagtgattgtttgattaccggaaaacaacgatggatcgaccgggaagagaagaacggcgacggaatgaatagcggagatcacttggtcgacatgctttgcatcagaaatagcagagacggcttctccgaccttgtggagcaaattgttttcaagcgttctctcttgcttagtcccttccgccatggaaaagtttggagagagcgaaaattagaagaatttgtctgtagactaatttttaagaagaagagtaaaacgtcgtcgtttacctcttttagatccacttcatacatatttctaaattctttaggcccaataaaaactaatcattttgggcctctaataaatgaatctttctaggtccaataggctctttgtagtttgaccatttgttattacaaagagcctattttacaaaaaaaaagtcgaggattttttaaatgtttttgggatgggaagcctataccatactggctctgcaaacttggccttggccaggagtatcaatgcgagctatataggaactgtagctatgtccgcattatcttgaaaacaagatcctgagcacaactatattgaataatatttaattttctttctttcactttgaaatgaaatatattgtttgataatccaaggatctcagaccttagttaaattattatgacttgtgtgatttaagcgccgaacataaaatttcttaggcttcagataaaaaaatccaataatgtttattaaaaaaaaactccaaaaccattaaatcttatataaaaaatcagtaaaacaattcattcataaatagtttagtttcttgatcaacaagtcactaaatctaggacgagtgaaagtgccgtcaaggaacatatcggccataaccttatacatagcctcggtcaagtggactccgtcccaattgatgtattgattcgggtccttacacactgtagctgcatccgtcccacacgtttggaacacttggaagttgtacggctctccaattccacaacacgccttgaacttctcggtgataccgtacttgctagggtgtttaatcaccgcacggtacgcgttccagtaatctgcgtagactattgtggcactcggatacttgatcctgcatttattaaatatgtttaaaatatatagtctactactatataacatcaaattattagttatctttacacaactgacctaagttgtttaagtttggattgaagggcaagattgtgagtgtaactttggttattggcactctgcacacatcctagactgtcccgatcatcttctgcggccaacgacattgctaacgttaagcatccagttgctggatgtccttgcaccaacatatatttcacacctttgttcaacaatgtctgcagttatgatttaagaaaaatgttattaactaaacatactacaatgaattcaacacaaaccggtcagttagatccatgaccaccagaattatttctgccatgatccggttaacttctaagccagactgctttatcatcaaatgcctattttgttattgtaacgaaaacaaaaaaacataatttgtcaagattgaacacatttttgtaatgaaaaaagaagacatttggttggagagccaaaaacacaaaaacaaaaagaaacatgtcaatcttgatttggttgttagtaatattttgtagatctaaaatcataatatttcatatatgttaattatgcgcttaatttataattaattacctccaaaaaccttgtaaaagttgagatactaagttctctaatggtgtcacttgacacagtagatccaagggtatacgcataatcattcactccaatttctccaatccaaaagagagaatctttaaacaacgaaaccttctgattcgttccaagtgtctccaagtacttctcaaaccaagcaagctctgtttctatagactgaggagtcatatcaagcgacagattgttcttgacgaaaaacgcgtgtttaatcaccgttgatccagagacagcgaaattaacgccgtgagtatccgttgctgtgccgttagcgttagtggttttgaggctgagatacggtggcagaaacggtaaattcattgactctgccacgaagtcgatggttagacgaccgtcggagtaacggtttgttggtcgtcggaagaaagtcatgccgtatggaggacttgacaagtgtccgaatccggctggtccttcgccggagcgtgagtttccggtgtcggtgaaagaatctccgaaggcgtagattttgttgaatggacggtggatgtttggaattgtcgccgctgtggagatggtggagaagaggaggattgcgacggagatggcggttgtgaggaggggagagatagaggaagacattgtgataaggaagtgagatttgaaatttgagcttctaatgaaaatggttgtgttatatacatgtagtggtgagaataaactatatacattcttttttttattatattattatatatatacataaactataatcgaattttggcagatgagatttaagtttagataaaattttatttattgtcgtgaagaataatttaagctttaaatagtttatttcgtaccacaaaatattagtaccagaatatattgtcgtttttgtccaaaaataaaaaggaaaaagaaatatattgtcgtttttggtaagttttattggccccgctaaatcccagagtaaccactaaccatttagagccttttagatgaaaattgtggttaatggatttgtaaaaaaaaaaaaaaaaattgtataagtttttaatttatttttagctaacatgtgtaagcctaaaccccacaaatatttgagaattgaatgattgtatttttgtggtgctgaggataattattttatgtggtgtgtacatgtatacctttttaatatgattgattttaaagttttttttgttcttatttatatatatatatgttaaattgtattttaaaaccttaatattttagttttttttttcaatttacaaaatgtacaaatggtaactacttataggaatatactggattcattagatgaataaatcactggaataaaacagaacaaacatttgcaccaaaactaaatgtaaacaaatataaaaatttgtttacacttgtaatttgtaaataatatttaacaagataatcaaaatatttatttctctgaaatgtaaaaagaagttttaactagtaatttttgtttactttgatatcatccaacacaaaataaagaatttcattattaatgcatgttaaaaactgtcatagctttggttcaccaaaaaaaaagggtcatggcttttacttaggtttggacctagcgttcagttatatatttgcaataattaaacaataatatggggaaaaatgaatattatagctattacattattaaaacagtaatatgggaaaacatattggacaaaatcataaaatataaacgaagtaactagaagataaagtaggtgaggcatgcatggaggggttaatgtagttggctggggaaagatatttagtcagccattaaatgtctcagccacctctcatgaaaattctcgctacgtgcgggagctaagaagttcggcgattgaaatgtactccatggtcggtaaaataagattttttttttaggtttgaaagtaagatttcaatcttaaacaaatcaaaacaaacaaaaacttgatgaaagattttattttgtttattatgattcaaacaaaatcttgatgaaattcaaagtaaaaaaaaaaacataccttggataacaaacaaaaaatgtttaacgtaaaagcaattcaaagtacacacttgtttgtgggtttgaaattgttaaacaaaatctattaaaactattcaatcaaacattttaagtgatttatgttaaaataacaaattctatattattcaatcatgaatttttaaaagtctcatgaaatctaatgttattgaacttgtatactttaaaatcttttgttattgaaaagattttaaagattgggttattagtgactttaagagacttaagtgaattttaatggattttcttagttaaaaatacagaattatctcatggttttaagtggaatttgagaggattttacaataaatcataacaactttcataaattcacccaaattcttcaaaatcataaaaaaaaactctaaataactcaatgagtagaagattgaatacacacctttagattcccttaattgcagagttttttttaacattttcataaatttggtttccgtgccattttgaccacataattttattttattttattttcgatttttttaaaatactctaagatttaatttcccgtagcaactaactaatttgaaagaaaaactgtctttcacaaattttatttttcaaaaccgaataattaatcttttctttgacatttttacatatatgcagtaagttgcatacctattatagtatatattgtatctcctgacaatgaatcaatgattgtaacacttataagacgttagtttcaattcatttatatcttggtgctagtatgatagttagcaacacccaatgtattaaaagacacttccaatatcatttctaattttgctgatgctatatcaatcatataagaaaaagaaaccatatgttggaccatcttttttctctctttggtcggttacattttgctgtcacaatttattttcttagcgaccataaggttcataacctacacgtgttggcgcagtgtgtacattaaatgtgaacccattaatcttgtttcaagttttttttaaaaagctgaagctgttagctgaatgataatgatagagatcttaatgaaagctacgtcaaagggagaggtctcattggtgttaaatcataaatgcattgtcttttttaatcttttagtgtagtggtcgctctggccaagtttagtaacttggaagtatggagtttcgaacccattcagattagagataacatggagtatttaagaccagtgtcggtgttagatcatgcagtgttttacgttctcgagggggtcatcagtaattgcttcttcctttttacaatgagttatttattttttctttttaataggaggcctcattaaaatatatttcatccgtttcacaacatgtttgtcgtttcgagacttattttttgtttcataataatcgcgttttgtatttttcaatgattttaaatcaaaccttagtttaatagttttattcctatttttagcttattaattagagagaaaatcgttttagtttattaaactattaataaaggatatgagtgtttacaccaatttgttttgaatacaaaataatacgaaaaagacttttgacgaaaaactaatatgaaaaagccttacaaaaaaataatcaaatgaattagatatcagcatatcattcatttatcatgaccgacatgaatgggttagcttcttcatgttaatttgcttgaaagttggcacatctttatcttatttaagtatttaactccgacttggtttgttttttccattcaaaaacagggcttcaaaatcaactgtgaaacattttttctgaatccaaattcgatgttaatacttacttaatttcactggattttatgttcctatttacttcttttcttccttcaaataatagttatgagtctaagttagaattttggttttgggttattcttaatgtattccaaatttaaagtctactaaataattagtaaacctcaacatttcaacaattgatgtttttcataactacgtctaaatttaaattttgatattcagtaacaatattgtataaaatacattaaaactgaagaaagatatataagttttgaaagttactcacttatattaagtttcatttgtatctgaaatttatgtttacatggataactattttattttatgattatttatttaactattgccaacttgtgatataccttaactattacgtttgcgaaaatatggcgaagaattaccgtgacgagtacgaaacataaaaaaatatacattgaataaatcttatcatgggcctagagaaaaaaaaccaatgatggcgtgtcggtagtttcatcggtcttaatatacattccctcggtctttgaagtatggttttggccttttggggactttgcttttaggcctgaattacgctgttagtatttgacgatcatgagcgtcattgtttaaattgtaaagttaaagttttttcttaattaatacacagattagttgaccaagttgaacgccaaccaaacgagaacgcattatagtaatttagtaaggttgaatatattatagtaaactagtaaatttcttaatacagattaatgtaatattagcacacatgacacaaacctatgttaaatatatttatacagttttttttttatcgtctaaatttattatttagtataaattataaaggtcggaaggaattgcccgtggtacaatcatttatgtaacagttgtcataatatttctacagtctagaagtattttctattatgcccacattattattaaagaactgttaaactcaaaaattttggcatggttaattgaaagcttttttttccacataactatataaatccacatttggatagacaataaaaaaaaattatatttagaataatttttgtctctgtttgtcactaattagagattacattagaaaagtaaaaattagaagcaatattattgatagaaatactgaatagggtaggtggaaaaggcaagaactattggcatgatccacgtttttagtctttttgctctctatgacttttttcttcattttgaatttactaaaataatattaggtatttctgttgggaaagccgcgggaaggaagaaaggtgagaatatgaaaaaaggagttttgtgttgttttcaacgacgacctcttctcctctctcctcctcctcttcttctatattacaatttcacctctctttttcccagatcatcatcatcctctctctttctctagattttggatatttcctcgtatcggattcgaaatcctctgtttctaattccaacaatggcaacggtaagaacaatatgcatctcttatatctacgaattctgattcatcttacatttcttgatatgatttcaaaacttccctcctttcatacaattttccaaatctcttatcttgaaaaaaagtctcaaactttggctagaaatctgcattttttttaatgatgaacaattctgttttttgttttgtttgtttggtggtgtgtagggaaatagagcgagaccattgccaaaatttggggaatgggatgcgactaatcctggctcggctgaaggattcactgtcattttcaataaagctcgcgatgacaagaagacgatgaaaaccgctgtcgcaggacctgagagtattgtttcacctccaagaaatgaagaacctcctaaaaacaacaacaaccatcatcacaaccatcacacccgtcattcccaaaccccaagatcaaaggtacttttttgccacagatactcaaagggtatatattaggtatttctctgcttgacttgttatgtttttgttcttttgttgtgcagaagaaatggctttgttttcgttaactctggtattggctctgttctgagaaaacccgacgacaagcaagcagaatcgtggagcgagtaatctccaacagattatagcgaccaaaccagtgatcatctaagatgttgttgcaaacttctcttcttcttattgctcgttgagtttctttctcttttgttttggacacatttgggtatatgaatatacgtttttcttgatgattcttagtttcataagtatatataaagattgagacatgttctttgtagacatgtcataatgcataatcgacatattatacgattacttacagcctgcgaaaaccgcttcaaaacccgggattgcagattcagcagctgaatctggaaccgagcaactctgttctagagttttagctcccatcacatccaatatgaaccaaccagggtgaaatttaggaattaggtttcaaacaagaaatgaaagaaacaggcaggctctatttaacctcaagagtcaaagagtagttacagattacaaagtccttggtgaaaacttgtcaaaagcattgaggattggcttgccacatagatattgtttggatagtataaataacctaagtaaagaaatttcaaacccatgatagagagatacaaaatgtataaattatgtcagctcctgaatgtttggttgtcaattccaaccgtcactttcattcccatttgcactgacctgaggaggttctacaatggcctgggagctttctgtcgaatatggaggctggacggaatggtcaaatctacaagctggaccgaatttgcagatgccgtatcgactgtaatatgtgcaaatgttttgatcctgaagttcatcaagcaatcagtcatataccgagggatcaaatctggtcacttctagattgattcactatgtaagagtcaaaatgttcatcaaacattcaagaattacaagcattaactatcaaaaactatcattagaaagcctgcaactttgtaatactagcatacaagaacagacaacagaaggtaagaaaagaacttacaggtctaaggggtaaacccttgtcattgagagcataaggaggcagcttcggcagacgattcttaggatggtggtatttgcaattgaatttgaacttgcagtccccagttttcatataataactgcactcaggttggtctggacgttctggaaattcttcagcaggcatttgatgtcggtattgtgacagcaacatacttgtttcagctgatgaattgttcattaggtatgtggtggaaggagaaaacacacccctttcagatgaatacacagaagcctacacaaatacgaaacacaagataaagtcatcatagataactcgaatagaaatcaattttattaagatccagagcttgaagtacatactacctgatagccattccactctggattttgagatgtaaccccatgagtttgtgacagcatgactggaataaaaggagatgtaccattcacatgccttggtgaagaccaggaagttgaacttgcttggaatgtagcctttggagaaaatgtaccaatggatacaccattattaccacgaaatgatggggagtcagttcctccgatggttgtaggatcaggatgattgaatttgcactcagctccatatttgcaggagccattgcgcatgtagtaagggcattctacttctccctaccgattgttaacaacattatatagctttggaaagactagcaacagaatgtcgaaaagtatccaacaaatatcaattaaatgacaataccggtctgagaggaaggccgaggaagttaagctcgggtgctgaggccagaccagactttggtatggtatggttgaatctacaagtttctccatacttacaccctccagtcctaaagtaatactgtaaaaacctcatgcaagaaaatggagcacagaaactgaatatcagtaagggcctgaactacaacaagctttgccaatgcagattgaatgaaacctcataaaacaatcgacggatacatcacgacgagggcatgtaacaaggttaaaaagagaagtaaaaaattaaccttgcaatctatcagccccaatttaccaccatcatcttccttttctcttactttattatccctagcaatcttcaaaacaatgaaatattagaaaacgaaaaaaacaaagtttagttttttttttccatttaaacttatgttcttctactaaagcaacatattaaagcttcgtcctttggtctagcattgaagtacaaagccaaacttatctaaacgcatgtgccactgatttaaaaatggtttcttttataaacaaatcttccctaagatcaataaaaaacacacaattaagaaccaatatccttatcagccacctaaaaccatataagaaagtgaagtttacttggaattttctggcaagaggatgattgaatttgcaactggatccgaatttgcagctccctgttctcatataaaaagaacaatcctctgctcctggcctcactggatacacattctcactctcgttctcgctccaaccatcaccataaccataaccatctctgtcttcttcttcttcttcttcttcctgattgatggtgactactgcattcgaatctaaacctccattactctcagagacactcatcatcttctcactctgctctttcgtaacttcattcaaacccacattcttaagcttatcactcaagtcctccgctgcgtgattgagatcggaaagagaacgatcatgagatgaatcaccagaataagatcgagaaacaggttttggctcaaacccatctgcaatttcttcggaattgaccatttttttttttttggtttcttacgaaatcacattacaaaaaccctaattttcagggaggtaattgaagaagaagatcaaagggtggaagaagaagaataaagttgtttcctttatggatactttattacatttgtcgtttatagcgtcacgaatgagaatctcaaagaaaccgttgctttaatttgttgacaaggtccaatagttcacatttcatgcacacttttttaacttaaaattatgcgtttcagatatttctttgagaattgcaactaagtccttatcgtattttgatatttcataattatgcaacatagcttttaattgtacaagcagctcctttatttatcaaatcaaagtctctctctacaccaggattgttattatagactaactgaagaagacgagagagaacacaacaaagagatgaatctttatgcaacaaacaatggcaattccaaatgttaagtcatttggtctttcgtttgtgccgtgtgctgaagtcagagagttttacatcctagttgacacaggtaatgtcattcattagcaatttggtaggtttgagtctttatcaaagtcaaatgaagtccacggcgatgaactctgactgtcaaccaaccaggataagccacgtatacaaccatatatgtcaaatacttgagtaacacaatgcttttcctacaccaggatttgttgttgttacagattcattcaactgcaaaaatagagaatacaacaaagagagaatctgtctgaaagtgaaaacgtctgcaacaaacaatggctattccaaatgttaagactttgactttataatcccgaattgacagaggaccagagagacatacacacttagaaaacccctaatattcgtacaatccaattttcttctaatagatcaatggagtaatcttcttcatgatagattccatgttagagcctaaatcaccttttgttggtcttcttaaccgaatgaccggtcttccttttatgccggctgaagtcagagacaaacctgaatgtttgaccacaatccggttcagcgcaaacataaggcctagcgcctgtgtgaacccttatgtgctcggttctagaccaagcccacttgaacgtcatcttacatcccttccatggacatttcagaggacggtcgtctgagtgaacacgctggtgttgaaccaaatacttgtgtgagaagaagtttttaccacagcctttaattgggcatatgtttcttttgtgtaacatcaactgtttttccgaactgaaactcatcgtgcaaccctccatgttacattggtatgctgcacattcctcttcctcattctcttcttcttcttcttcttcttctttttcctccacatctttttcagttgcaactctggagaaggaagcattaccacttctcttcttaccaatcttctttggttttgtttctaaagaccctctcgacggcttctgatgtctcaccctaagccgtgtgctaggtccctccatgtatgaatccaattcttcattcttctttccagatgcaaattcttgcaaaaagcgaccttttgtgtctctcgaactctgaactgtcttggtttttgctattcgtttggctgttgacctggtttgccttttccctgtactgcaaaagcctcgttcctccaaagaattctctgctgaatcatattcaccaaccattcgattagcttgcctattacttatggatattcttccgctttgctgataaacgccattatcttctgactcatatgaaactggattcctaaaaactcttgtctgttggctccttggaatccccctaggctgcctgtcgatatcatcatcatcatcatcatggtcatacattgaatgctgagagccattctccattgagctctctgaagctgcacatgcccgtacagtatactcttccccaagtgaacggtctgaaacctcatcatctgactcaaattctttataacctttatgtctgataattcccttgtgcggatcagacatttgatttgatgaatcaccagaagctgtgttccctgtctcaaaataagactcttcctcattcccggaagccctccattgctgcttataagaatgatcttctgatgtgtcatcagaaactccatcttccctcttaaaagaagtaagcttcttgcgtggcaccgcctttgctcttatctttctcttcctacaatactttcttccaaacattgttgtcgaatccctggaaacattattaggaaacgatctctttccagtggcatcctcatccatagcaactcgaagatgacaacttctttcagattcttccccctctaagtcctgctccagcaaaaagggatgcacctgaagaaagaaaagcaaattgaaccaaacagaagtgtactaatgtctgaattagtatggattcaggttagacaatagtacctgatgtgacatccaaaccttaccacaccattttccaacaacatatttcctctgtctggacgatcttttaccagagactttgggtttcgagggtgagctcgctactggagagctgcgaccgaacgccttgtatatgatggagttatacggcatctgcttactgtacagaggagagcgactgagaatagcgctgtaagaaaggttaacacccaattttacggtccaatcactgttcccacccttagcttcaacattatccaacgctgcctgaatcgtttcctcatcctctcgggtcacattcctgaattcagtatcattccattcgtgattgatgacgagctcttcggcaactatctttgcttcagcctctatcctggggtactctgcaaatgttgtgcgtcaaaatgatgaaaaagactaaagaattgcataactgatacagaaatactaataaaatgaatcttgtagttttgatgttacctggatggcacagtaacattaagttaatccccccaaaaggacgaagttgctgttccacttccgcagcatgctcaagacaaaacacgtgcaaccgacatgaatcgtcatcagatcttggaataaatggtaaagctatttccagaagtgatgattttccgcctttgcttaacccattctgttcgctggttagtctctggcagttaaaatcagaagttctaccatctctagcctcctcatggccatctgaaccttcttgatcatacgtttttgtttcccctttggaactaggggtaactaagcctttttgatcttcttcctcggaatcagaagagtctccatatgctgaagctaacatcccaagaacatcattatctttatgcgctattgtcggggaagttgttgaagttttttgatcgccagtcttcactgaatgatccatagtttgaacaggaacattgtagaagtaatttacatcatgcttctctttgctttctgcatgatgaaaaaaagttagtaaatgctaaataacagccaataaccgaaagtgcgacctgtaacttacgaggatgaagtgatcttgcagcctgaccaagatttgcagatccagaagcagctgtccaatcattgaagaagctacaatctgcagacatgagatatctagcagctgcttctttaggttgaacgatagctacacaatcaaagcttaagactccacatgtaacacaagagaaaagcctttgatccgaaagcgcaacagctgcatcattcttcctcctttcagcatcagacagagtttcttgagtgtccttctccgtgcttgctaggtgatttctgctcctttcacataaagatgtaaatttttctttcactgaaactgtatcctttaaaccgttactgagatcaaccacaacactatcagaacttaagtcctcacactttaactggattgggttttcctggttggttatcaaatgggatccaattcgcaggtcagaacaaactgatatatctgaggaactctgtgggagaagggccactggggatccttttccgagagaagaaagcaattcgttgttgtggataatgttttgcacaaatagctttttggtcaatctttctccttcgcttcttgccttatcttttaatctagaactccgtggtttgggattgatgcttgttggcactctgcaatgagtgaaacataccttatatgagcccttcaagcagcttaaaaagtttgagtgtgtctatagaaaagaaagagtacctagaacctagagccaatacaaagtcataaagtagctggagatgagaaaccattggagggtaatttatagcagctcgccggatagcagcatctttagccattctcaaccattcgggagtggcaatgttagatgcttctccaaaattaaatcctgtacaacccccacgattgtttttatggataatataagttatttcaacatactaggcctttgaatggttgacttaaagatactaaatataggtcgcttactcaccatgactaaatcccgaatgataagctcccggaaaggtgacgacaaactctccaggattttgcactaacctgatacaaaaaaaccacttgcgtgaaaaaccagaagaagaaaaagtgtgccaattataagagaccaaagaagagacatgcaaacaacaagatgatgagataaacagagcacaaacataaaaaaccattacctgcaacacggtattccggctttaacaaatacttcaggagacatcacagttgtcttctcaccaagagtagaaaatgtcactaataagacaagaacgtaagaggcataaccaattagtttgcttgcatacagcttctacccctgacaacttttggagggaaagaaaagcatttaaaagcaacaaaaagaacagagacacaacaaagccaacaatcagaacaatgaattgatacattgagtaactatgagtcactaacacataacacttatcatactcaccaagaggattgagctcttcaccgtaaccatgaaccctaacaacctcctcaaaagccagagcagcatcctttggcacaccgtaccaagtcttaccagcacccatatgcaagtaattgagactatgaaggtcatggtcctccacatgccaagcaaaccaactaaacatcatagcaacatacaccattggtgatgtaactccagggatctcttccttcatgaacttaagcaatgatccttcggctctagacattgccctcatgttccaagcggtctcaccaactgttcctccttcaccaccagactctctcctcctcgcagcagccagactcagagggataaaagccgagccaggcatgtcattggcatactcaacagagaagggtttatccacagtggctctccagtaaagtgtttcaatttcaagggcagagagttgactctttttaccacatttcttgagataattcttctcaaagttcttagctttaaactcgaactcaccaaaagagtactcctctccactctgccacacaggtctctgcactggacgctgtttcctagggcaaaacccgatctgctgctggcgcgtggcgaatgtgggaccaccgtcataatcacacgcgccaaagccgccgtcacgaaccctcgccgccgctcttgccgccagagaacggttgagattagaaatcgaggtttttttggaaggaggaggcagtggaggcagaattttacagattccatatctagaagcttcttcttcaatcttcaaaatgtaagcgatcggatcttgaaactctgctagagtaggtctgaactctggagcaaccggtaacgatttaagccatggaaacacatcttgactctgctctgaaaccgccatatctctctctctctctcacacacacagggaagaacaaaaaaaagagactttctctcaaaatttgttcactttaacttctaggtatcaaattaaaacgccattacagagtataaacagaacaaaaattttgaagagaggaaaaaaaaacaaactttaagagaatcgacgagtctccaccatttctccggccaatagagttattttcttaaagggtcattcacttttcctcgaaaaaaacgacgggctttgttgatctcgtttcttaggtctctctgtttttattggattaaagaaacagaggaaaaaattgtattttttttagggggttgggatgggtttgggcagagcaagagattgtgatatctctgtattaaaacaagtaaagaacacttagttagagagagaaatggtttttaaaagggtatgattttcttattatttacgattctgccatttctaacacacatttgttgttgtcctctctgtaaatccgtttgcacattcaaaaactcctttttaaaaccaaacataaatcccaattttaagagtaaaatttttgatggttttaaaaaagatatttctcattaaacatttttagtctttggtagttcatgaaattagtagaaattaatgtatgatataaatgtctacatatattattgtgtttgttatgctgaatccaaatttgatttttatgaatatgaatgagcccaaaaaaaagaatttgaatgagccattggtttaacgaatgttgcctctacctactgactaagacaataaagcaaagggtataatatgcttaaaatacaccaacaaaagctctaaatctttagaaatgactcaaaagttaataaataaaaataattaaatgaagaagattcacaattaaaaatatcaacatttcttaggaaaataaaacatattaagataagcacaacaataattataagtacatttgagagttcatcagagtaacaaggctaaataagtgtctcaataacctcaatcaaatcttcaatgcatctctcggcaaagtaaaaattaaattctctgataaaataagctttggcttgttcctaagaaggccttatgttctaatacagaagaagatgattttagtttgacacctggttctgttccatttctgaagatggcttcgaaagctcgagtgtaaccggacaatgatcactcccatggaaacctgaaacaaatcaagaaccaaattgttgcaaaaagagctaataataatcttctatgaatctgtgtgatgaacaggtttatctatggcaccttcaagttctatcccacgaccgtgcatcttacaagaaactatacggtctttgagttgttcagagaccagaaaatagtcgatcctcatcctctttccccggtacctatggcaaccaaaacaaaaaatcaatatatagctttagaaacatgcggaggttctggactccaagccataaaactaaaatgtgtagtatccactcactttccaatgggattccccgaccatgagaagccactttccatttcttgctccttgtgtagataccggtatgcatcaacaagccttcctctgtaacagttcccataaatataatttataatcacatgtttagtaactctaatctgtattctagaaagtactactactaagacttcgcagtgcaaagacatattacgcatactcttttatagttgccccgaagcgtcctctctcagatggtgtaaatccaggctgtccgcagtcctgcataatcaaaaaactcaaaaccactgtagtcattgtatgatttaaaggtccatctcacggagaacctttcggttcaggcgtagtaaagtcatcaacaatagcagggtcacaatgcagatgaagagacaagataggaagagaaatacaggcgtagtaaagtcatcaacaatagcagggtcacaatgcagatgaagagacaagataggaagagatataaaaggccgacggaaaataacattattgagagccagctctgtttttagataaaagctataatgataatgaataaatcgtacaaaatatggtattccttacctctttgtttggaggaacataaccattaagctttgctgtagcaaaaaattctgggtggctaacatctatctcctcatgactgcgtattacaaaaatcgaatcgaggaaataacatcaacttttattctgtaagggcttaaggaaaagagtatagcaagagaagatatagaaaaaacttcctcattacctgacatttaagtcgccacaccatattagcggtttatcagatgttttgttgaggaattcaacaatcctcttgtcccattttcttctcctctgaaacgcattctcttcatctttccaaccattgttaggcgaatacgtattcaaaagacgaaatgtctcaaattcagctaagataacacgaccatcaggttcatgtttagatgctgcatgagagcgacaagtatataagttagtcatcaatgatctagctatgatatatttctcccaagtacatcaactttgagatcaaggaaatggcagaaccataacaagacagataaaagaaacatggcttcaaattgctagtgtgcaagagatttatgtgatgataaggaacaagcaacaaggctataaaaatacctaatttgtccaagttaaagtaaacttttcgaggcttgaaacattttttcactaacaaagctgtccctgcatacttcgagtccgcgagagaccaccaaaccccataatttccaaatggtggacttgagagagcccgtgtcaaaatctgcaagttaagtttcccagaactaatatcaagcttgaatgttatccaaacaacaagagagtttgttactccataagtggctcccgcattcttttaaaatctgtctataaccatgccactgcaatgttgattctaactcatacaccaaaatctcctactaattgcaaatgcatcaagatacagagctttgaaaattcttgttccgttggtactataatacaactattttaacagatagaacaagcaagtcaatacagaaccatggtacctgtttttcctcacgcaaaactttcgtgtcatcactcaactcttcatggtttttaggttttccctttccaccagcagcaggcatccttacttcctaacattaagaacacagtcaaccgctaagctcagaacacgctgacactaaaagaatcaacagccccctcccccatcgtagtcacaaacaaattggattaaagtctgatcttttgcaccattaaccatttaaatgtcataagtgactgaatttgcatcaacaagttgaactcaaaccacttcaatacaaccctagaagacttggagggttttaaagttccacacataaacacctaagcacatttacccacattgctcgaaattaacccagggattccaaagacgaagcaaaagaaatcacctgtatggcgatgacatcggggtcaaaatcggagacgaacttagagaactgagaccagtcatttttcacccgaaggaggaagctattagcgttccacgtcataaacttggacggctcgttctggttcttctcttcttcaactccatctccgtctccgtcacgcttttccggcgaaaggcagggtttcttagccgccggagaattctccttctctatgggcttgaagaatcgcttcatagctatagcaatttcgtagctttatggagataaaactcaattcaccaaaattcagataccaacttgaaaaaggtacgaactttacgttgtcccgtcgtttgttgtatattcgaagctttgtgtttcggcgtttgttgtatattcgaagttcacatagaaatttgcaacaatggtcaagcaaaaccatttacatagtaaacccaacaacgctcacaagcccaatatattgtaacgcttttcttcataatgttataatcgaattatattatatatatggttttacatgaatgttctgttcaaatgactatacacaacaatgttgatatagaaacaattttcttaatgtggtttgtagtttttaactaacgaactgtttccggagaagacttccacagaatgccaaatcaaatctctcttctggagggtctccaatgcagtcgaaaaccgcatctgcgttctcgaaatcttcatcagccgtgtatctacaattccaaagatgaaagaacgaatgatcatttcaattctgattgttatggaattatgaataggattctgatttcagactaaaactcacccactctttgtaactatacaagtcattcccgcagcttttgcagctgctagcccgatcgcgctgtcttcaaccactacacatctgcacatacacaaatccatatctcaagagagttttctaaactgactcattctctcctgtaaagaatcttagtaacactttactttgagggatcaactccaagggtttcagctgctaagttgtagatggcctgttaagaaacaaaaagtttgatgactcggtctttaaccaagacgaagcaagcaaaacatatgttgtgatagcatggaaagtgagtaacttactggatcaggtttctttttggggactacgtctcctgcgaatatcttgattttctctgctcgttctggtccaagcaagcatgaaactatagcagaaacctgaaatcaggcaagaaatgagaaaagtatttccgattatacagttcttctaagctaagacgatgctcgcatattcatgttaacgatgcagctgcgcgtagtcttgtttacgaaaactcatcaggatacaagattttgagatatatggttatggtctcaggaaactgaagtagtagaacctgattgatcataccgccttctcatttgaagtactgcacacagctactttgactccgtttgttaaagcttgatcaaccaacctgcaaagttttagcaagagggctcagaacaaacaagaacatgtatatgattagttgaaataacaagccttacaaacattcatagcatcatgattcaggagtatcaatcattagtaagtttgctaaaccttgttttgggttaaaagttttagactttaaaaaaatcaaactcaaaagggacattcaagtaatagcatcgagaatatagaatagaacattagaagtgacactaactttgcaacaccgggtcgaagcggaagcagctttttctcgataagaaccatgaaaagctcagtcttctgcttgtgaagtccagctatgaactctttcctctctgcttcatctttaggagctttctctggccaaccaaccttgttaaaatacgcagtcatcctaccaaaacaaagccactccaatttcattcaaacgagagactaactcaagatttggtatagtaaatgcaattttgattgtatacctttctttaccaccaccgattttaagtaactcgccgtataaatcaacatcccacgtaacattcaaatctctctgcaaaagattccaattatcatcaccgaagctaagagctaatgaccaaaaaactaaaactgagaaacctctttgaaagtgtcgttgaaggagatcctgtgaccgtccttctcggtatcaacaagaacgccatcgcaatcgaagagaagagcagagggaagagtcgtcagagaagatgaagcagagcaggtgactccaacggagcgagatgatctgtataccattggttttgctctcagggactttccattgaatcgcaacttcaccgcctttgcaggtgccgcattgggaatgaaagatggtgataacttagattgaattgaagaagaagaagaagatggtgatagcgaagccaaggaaagagagattttcacagtggccattgttttgattctctctgtctctctctttatctctaatcactctgcgaaataaataacggtcgcgaatgtcttcaacttatccggtctttgtttaacgaccacaaaataagaaagaattgaaagaaagagccacccgagtacgggtcgggttagctaattcggtatttctctacctattgacacaccttaaaccgagtttaaataaccttttagacacttttgattaaaaaaattctatttatgacagcttaaatacttttttttttgctttaaatcttccttcttctccttttttctagaaagccacaacatttttcaaaatatagtatagatatataatattattatgcgatatttctttaatggaaaaaatgttgtttaatacgccaacttttaaaacatagtcatttaatacgtgaacttcgtatgtggccaaataaaacatgacaaaatcgttgaccaaccattttacacatagaaaaacgttgaccatgccacaaacaccacaacgttatctgtcgttaacataatcgataacagacgttagcagacgttattcattccgttattatccaaaacgacgttgttttgtgcttaaacacaaaccgcaaaatcccaattcgattttttaatctctaaatctcagaaacccccaaatcttcaaatccctaaatttccaaatcgatttttcagtttcaagcttttatctttgttttcctctttatgttctgagatctagagtttttctagatttccttgttctcactcttaattctctttgtgtctttctgagattagtcatcggttaagcaatttcaaggtaagggggttctaagtttcttagatttttcttcttctttgggatacaaaatctggggtaatcaagagaagctcaatggatgagtagaagaaaatctctgcttttagtgttaacaatggtggtttctcggaatcgacgtgtgttttagacttttaaaaatcaaattgagatcttgtgatttgtgttaagtacaaaacaacgtcgttttgagtaataacgaaatgattaacgcctgttatcggttctgtaaacgacagaaaacgtcgcggtgtttttggctttgtcaacgtttttatatgtataaaatgaccggtcaacgtttttgtcatgttttatttggaaacatacaaaattcacgtattaaatgaccaattttgaaagttggcgtactaaacaacatttttctctatttgttaatataattttattttgtttataacctcggtaaaaacattttacgggtccgtcattagctatatttataattgaggaaaagttgtatgcacaacacaatatcaagattggtttttgggtttcccattattcttcgaattgtccaagctcctatcgcaatttctcgatatgttcctagaagattgatgctttagagttttctcatataaattttgcaaccactgataagctttcactattttaatacaaaaatatattaaaaccagtttaatcattaatttcatgtttatatataaggacaaaaaaatcataaagaagttagctctcaaacaaagatattgctactgcctcaccaaattttcctccggaaagagagtgagaaaatttccaagagaaagaggagagagaatggctggagaagaaatagagagggagaagaaatctgcagcatctgcaagaactcacaccagaaacaacactcaacaaagttcttcttctggtaactaaaaaatctcggttatgtttttttcatctttcttatgttcttgtttatgttcgatctcacttttgcaataaaatctgagactatctctcttttgctaagctgagaataattatggaagttgaaaaaagacatctatctttaactgatgtgtagagctcacaatttcttgcttggatgggatgattgatggaattagatcagaacgctagtcttgtttgttcgctaattgtttgttcatttaacattttagtccaaattgaaccaaaccaatcggttagttttgatcggaccaaatttgattttgacaaaaactgtaattgattttacaaatgtaaacagagaatcatttcagtttcgattcagatattttagttcagttcaattcattaaagttgatacggtttcttggtaacaccaacttagactttaaagcatgggtagtgctctatgcatctttttaagtaaataaatatatttgggatgtcagaagaaaagaagtaatactttttggttaaaactagaataatgtgtgtgtttttttttacctttttaataaaaaatttctgtatagttttcacagagttatccccttttgtctttgaataatctcatgttatgaaattaattctctaatcataatttcataaaccaatgaattaattaaagagtcaaaattctcgtaacaaatatatatattaataaaaccgcttaatgggctggtctaatgggccgaaaacggtttactaaatggtcttagaagacttgtttcttcaattatgaaggttatctgaaaacgcttctcctggtaacgttcgtcggagttttagcatgggtttatcaaacaatccaaccaccacccgccaaaatcgtcggctctcccggtggacccaccgtgacatcaccgaggatcaaactgagagacggaagacatctggcttacacagaattcggaatccctagagacgaagccaagttcaagatcataaacatccacggcttcgattcttgtatgcgagactcgcatttcgccaatttcttatcgccggtaagttttccggccaaatctaacatcacccatttgttgaatcatcgatagcatgtagaaaaaatgtcaaaatttgtgtcttttagtgaagctaatggggaaaaatggtgtctttgtgcttaggctcttgtggaggaattgaggatatacattgtgtcttttgatcgtcctggttatggagagagtgatcctaacctgaatgggtcaccaagaagcatagcattggatatagaagagcttgctgatgggttaggactaggacctcagttctatctctttggttactccatgggtggtgaaattacatgggcatgccttaactacattcctcacaggtactgcatttgaatctgtcttattggttttggaaatgttttcgatgtatcgagaaagctattaactttgatcttgaaacaatagctaagatgtgttgtgaaatgtgtttttttggttatggactttgtttacaggttagcaggagctgcccttgtagctccagcgattaactattggtggagaaacttaccgggagatttaacaagagaagctttctctcttatgcatcctgcagatcaatggtcacttcgagtagctcattatgctccttggcttacatattggtggaacactcagaaatggttcccaatctccaatgtgattgccggtaatcccattattttctcacgtcaggacatggagatcttgtcgaagctcggattcgtcaatccaaatcgggtacaagcacatctatagacgttcagtttccatatcataagtttcatacctctacaatgagaagatgatttggaatcatatgatgtgtatattcctttttttttgttccaggcatacataagacaacaaggtgaatatgtaagcttacaccgagatttgaatgtcgcattttcaagctgggagtttgatccgttagaccttcaagatccgttcccgaacaacaatggctcagttcacgtatggaatggcgatgaggataagtttgtgccagtaaagcttcaacggtatgtcgcgtcaaagctgccatggattcgttaccatgaaatatctggatcaggacattttgtaccatttgtggaaggtatgactgataagatcatcaagtcacttttggttggggaagaagatgtaagtgagagtagagaagcctctgtttaagtcaatgtggtttttaagaataattaattgcttgcaatgctaaactagttatgatcaacaatcaaatcaaagcaactttagtcgttaatacaagtgtactaatgtctcaaatgaaagggctggcggcatttacgggagcaaatgtagacatcaacgcatagattacaattaacaacattgcaattattccaagcctttagaatgaagcgatctttacatcgagaatggcattggtcgcagaatggtcgagaactcttgctgttaggaacaacttcatactcacgtccatcgacattaatgttccgccctggcatgagacgcgagaagtctcccagtacacacttgacatgtaaagttaccccgcagtcataacaagtgtagaaccatttctttggatcggtttctgtttcgcatatgtcacaccaatatttgttatccttaatcacatcatcttcgccgtggcatagagaaagaggatgctcgtcgtagcaatgttttaccgttttaggtaaattagcacagtagaaatccaaatcaaagtcacaagtatcacaacatagtactctaggtttcaccactttgttgtgacacgaacgacatgacttgccttgccttctgtagtaatataacggatgtgaatgaccatcatggagcaatggttctgacatcgaaccgcaatgcacatctagaatccaatcaccagaaacgtatctaaaaccattggagattgttctacaagcatcacactcaaaccaattcctagaagaatctttacctcctgtgtgtaacgtaaatggtttgttgttgaacacatgccttttctttcgagggagatttgcacatgtttcatgaagaacataatcacattgaccacaactgtagctaggatctgacgatagaggaaggacacatgcttggcaacgtgtgatttcatcatgttgagtgatgataccattcttgttgagcatcaaattatgtttttcatggctgaaatgttttatcgtgttgtcatcaaccacctcgaatggcgcggtatcttgctcactatcttcaggagtcccttcgagttctattccgtcccatacatcatctttcattgcacattgtggatgaacaacatagttgggacaaagagagcaagaataacctccgtagtatccattaacactttgacgacatactccacattctgaatactgaagaccaagatgatgcgtgagagagatgcgatgatcatgacgattgatgttaatgacgcgaggtaaatcgatgcatttccgatggattaagtaaccacatccaagacaaaagtaaggacatccatcacctttcattccacaagcattgcaaataaacttaacttgtctaggcaagagagttagcgtatgctcgtgagtcttaagatgttctatagcaagcggtggaggatttatcgcacaataaacacagatgctgaagttgcaaacggaacaatgataaatcaagtgatctgatacgtcatcacacaaaagacaagtcttttgagcgctatcaggtagcgactcagatccgaaaagctcgagagtgtgattagtatgagaagaatggtggacctcccgcgatatatttatgcattcgacgtggaaatacacatcacactcaagacaaacgtaaggatacataccaaaaactgttttcttgcaaactccacaatgatctttcttcacttgcttctccaaaagaacaagtgaatggttatgacatttgggattttcaatagcagcaagtggaggtagttgttttctcgcacaagctatatcgatattaaaggcgcatatccaacaatgatacgtaggaccaaacaagaaagctccacaaaaagcacacgtaccacttcccctgtagtcgattaagcagagcggatgctcgagatgggaaggatgattgatctccggtaatgattcgccacattctttgtgataccaaacatggttacaatcagagtcattgcaacggtagccactatagataggtgaggtttgcttgcaaccgcggcaacgaccatttataaaccttgatgaatggtataatggatgcttgtgaatcggtaaatctactgatctctccattgtgcttttgtgattcagatctctttctttctttttagtcaacccttgtttttttttgtcatgtcttgtgtggtgtttttgagatgtttaatatatatgcgcgttgaataaacaaatgataagctacatcacaacaccatcgaatatgaggctataatgttcaattatttgaataatatatggattaaatttcttttgattgaaatatttgcaaacattattagtaaccaattgtatgaataattggtggggaagtttcagagaacatatgcatgtgacgtttataaaaacctatgtaaaaagtacatagaatgatctttcgtcggaaacaagtacaaagaacagtttgaagaacacccaaaaccaaccaactccatatttctatatatgtagagactcagaatcagtcaagaatctgtagaacacccaaaatcgcggtgtagccaaccgttctcttcagcgtgcgcaacatacgagttaaatttctcttctgcatttggaatatccaaagataagtcatcaagactatctttgactcgaccaaacccttttgtcatttggttagtagtaatgatcccttcagcaaaacactcctgcaagagattaagcatccgatcgttcttcttctccattgccattaccaaagccttcttaaccacctcgtggttaaaaaacggcattcctagatcgcgtatgcatcgacaagcctctgatattactcctcctacttcgtattcttctagaagtttccagatcttgtctttagcgtcttccactgcccagcccgttcccccaccccagcttctcaggagtctttctcctgcgtgtcgagcggatatcagagaccgagctgagcggatggtttcgcttccggttgattttggcggtaagctgtttgagatctcttcgagattaagcggagccaagacatcatcgatcacagctctagctagaaacagagcaagctcgtctgatgctgctaagatgtctaatgctgtatcttctgcggattcgaggagcatgatgaaaccatttatgaagtcttctgttgagaacatctccatgtgaagagaagcgagaaaaacagaagccatttctttctctttgttcttcctatccatagcaagagtgatgagtttcttcaagaataccgggttatattcgggtaatcctaaatcttcaagactgcggattagctcggggatatcatcagaaaggaaatactcttgaattatggtctctgcatccttcttgaaccgccttagattttcgctgcccccattttgatcagagcgttctttaaacgaatcttcgtcgagccaacctcctattatagccttgggaactattgactcaaacagagttttagcagatgggatgtcaagagaaagatcatcaagactatctgctactcgggagaaccctttcgccatttgactcgaactaatgagaccttcttctgtagcttctttcaacaattttagtatcagcggctcggatgttcgggactccatcactagaaccaaaccactcttcacgatctcgtgatggaaaaacgagacacctaactccctgatgcatctacaagcttcacgagtgtcaccattctctacatattcattcaaaaattcagatatctttctctttgtttcttctaccgtaatgtgagtactcccaccccattttgtctccactagctctgcgtggtgaggagcagagagatagctattttctgaaactaagataacctgaaacccttgagaggaatgcggtagagtcttctttgctctagccagaaaaacggggggaagaatttcatcgacgatggcccgggcaataaacaaagcaagtacattaacagcatcaggtatgtccaaagcaagatcaccaacggactcaagcagtctaataaacccaaccctgatttgatcaggtgaaacaacaagagcgtacaaccgcgagagtaacaccgaagccttctccttctccttattgcccctgtccatggccatggaaacaagcctcttgacaaaataaggatggtattcgctcaaaccaagatccataaggtcagaagcagccacttcaacatccccagagctaaagtattcatcgatgatggaaactacttctcttttgtaatcttccaaagggttaaacacaggggaaccaacaagtgcataaggttcctctccagtatcacaagtatgatctttatcatcatctgttgaaacgtacaaatataagcttcatgtttgaaaagcaagacaagaagaagggaagtataaatttactaagaaaattgaataaagtattaacctttcttgacagcaaacagaggaggagactctagagccagtttcgtctgttgtgcattcatcacaaaccactccctcgttgccatctaaacacgttcaagatttatgaatgatttagaaaacaaatccgaaaacaacaagttaagagcaaaacagaacacaacaatctacattctagaacaaataacattatagcttggcttcataacattaattaaacagaaaaataacacgaaacaacactacctctaagttacaaacacactggtttgtataatatcaaagaagcaacatataaaacctaaatccagtaatagaattatacataccagtgattaattcgaaacgaatccaaactaatcgaacgaactcttctgtacttggcttcggatctcaagccaagacaggaagaagaagaagaagctatcagaactccgcaggtaagtaataaaaatttccaccagagtcttagaagattcaaatgtcgccgatttctaagttcgacgagactataaatactagtcgatgagagagaatcggcgatttacaaaattggaaaaaggaaaaacaaataaaaagtaaagggaaggtacacgtcatcatataaggctttttaaattgtggagaagccattaaatgtaatttaattctaaatcaaacactatactttttattagttcagataggtcctaattagttttactggttgacgtgttttgaaatatcttctttttccaaagaagttttcttacagacattcaatccaaataaatcgaattttatatatatacatatatttttcaatacccatagccattatttctcttaaaagaatccaattagaatttaggcattctatacaaatattaggctaaatgtgggggttttgtgtagttttgtaagttttggtaattatctatttctgttgattctattccacgtgctctacactcccgcacgtaatcgttcctatcgctgcttttttccattcttatccaaaagtttttacaaatttaccaaaactacccctcaatgccatgcaatgagaaaaaaggtttccattggactttgccaaacgattcatctaacaagaagtaacaccgaatctaaaagccggacattaatttcaatatggtttatttattcgactgaaattcaaatttcttgaaaactccattttttgcactatcaggagaccagagcaggctaaaactgtgataagaaaaaaagtaattgttgttacatgtaggaaaatgataattaaaccatgttgggacgttgaggaagaagaagattgtaaaacttgttgtgcaagaaaaagctttttcctttgctatcaacagcttttttccacccacaccaaccaccattgacgatcttcttgtgatcttcacttcctgtataatgcggatccaggatcaggaacgcgcaatccccgcttccttcatcgtaatccactcccaatagcgtgtatgcaagaaccccacctcctgcaagtaaaaccaattcacaatacaaagtttaaaagattaaacggatccttcttataggtttctttaaaccgcattaaagactggtccactgatcctttatatatagggtctacgctttcacttatgctataatatcagagtgatttggcttgacttaccaatcattattggagttccttggttctcaaagtgcatagctaactcccggcatttctctgggagctctgatccggatctgaagttcataattttgcaacttacctgcaaataaaagacattacgagcttctcaacatcaagttcagagcaggagacttacaccaagaagttaagagcagaagacttacaccaagaagtttatccaacacaaagcttaactctatggcaccaatccattcacgcgatcctacaaacgaaggatccttgtcacctatttccacgagtgtctgctgtatttccctgagaatccagaaaaatacttagcgaatcgaggaaagaggagctctgatttatattcatgagaaacagaagtttcatacctatgtgaaggtacagatatggatgtgtagtgttgaagtctgaaccacgagataatagtttgcaatgatcggtaagcacatccccatccctagcacggcaagtgaaaattagtgttagatgttgagaaggtatttctagttttctaaaatacaatagaaatacttgaagcgcaacaaactatcatgccaataatcatttacgaactccagtttccggtatgaatgcagtaaaagattctaataaattagcacagagcctttaatccctagtttctgctttagttttgtttcactccacacgtcatcagcaatctacttttacagtgttttaaaaccatggaagaatgagaaatgatataccgagtcatcaaagccatcctgaagataatgataatactcataagaaccttggataatagatgccacaccctccgaaactgcataacattgcaaattcaataaacgaatcgagagaccgaaggatgaacaacggaaacaaaggcatacaaatagtactaacctccgctgctagggattccaatatgcacatctttgagcaaggtggaacctggcatttgcccatgcaacttaacaattagaaccacggcaaatattgagacacagagagaaaattaagaaaacaggcaaacctaccccttctgttcatgttactctttgagtcatcattcacagacaaatccaaggcattagcaattcttaaaagagggcgatccagtggcagaccaagcctcaagtgtagcaattttctaacatcgactgcaaagaaagtatagaggtagaaccatataacaaatatcataaatcacataagggttgaggctgcaataagagtttacaaaggatcacagttttgtgtggaggtaatggttctaagacactgcagaatgataagtttgctacacaatttattactcatgaactgtgatgtattaagtaagtttgcaactaaaagttctgaatcttgcagatagaattatctacccagcatagtcttctaacataactacaattattaccttgcttcatttctgtctctccgtagttgagctcgtacatacttgttattggatgtaataccccgggtggattaaagtgatatatacgcaactgtaagagcaaagaaattttaaaacataaaccaaaaaggtgagaaattgcaaaataaaactaaaaccatctcatctcaccaaggaaaatattgcttgagatataaattatgttagataagtagaagaaaaacctgaggatgttccaccaagaggtgtggtaagataatcttcttcagggaatataactgatcaaccaaagcaggaataactaaatttgagactgcgtgcataagtggaagatccttgggtgcataagtaagtacatcaagattcaaatcaacaacaatgagccttgcttcttccatagctgtagaaatgtaaaaaaaataagatatgagaacatggtacaaaagtattcttagtaccacgaacatatgcttgataaaataatctatatttcaagtgtttacctggaaaatattctgcaacaggggcaccagaggttggaagtttttcagatctattaagcagaacagatatgtggattttatctgcattctaagaagaagaaatttcaggggaggagaaacaacaataaaaacacgtggtagggatacaaacagcgctatgaaataaaaagatctcagtttacttacctcagccgaatttactgctggagcagttttgttattcagacacaaatgtgagcatgacaacatcttaatgtcagatacttggtcagcagaaggaagacgattaatgtttgatgcatcagcaccaaaacccaaatctttaccacggaggacgactggctttggaacgcctccagaagctttctttaaggtctcagctatgtatacaacatatggttctttaaactgagtaataactgcatcaattgcatctgaaaacttctccttcgaatctagaaaaaggataccaataaacttgagaaaaagaacacatgcaaccaaaaactgaagataaataacagaaatttaaaatcataccagagggcgagcttgcaggataataaaatggcaacttgattggaagctcacagtgaagcaaacaaccgttctcccataaatactttccagacttatcctcatacacaacagaaccaacaggctcaagtttcgttgtgttttcacttttagagatgaaaaagtgaatggtaccagtgcctacatcgcaactagccccaactatcttttcatcatctaactctccaccttcagataaatgctttcgcaatctacgagcagctcgaaccgcctcaaatgcgcttttctcagcatcagaatctccaattatcagacctccaatgacttcaaaaccttttggtaacaacttccggagatcatctgcatacaaatcccaaaagagctatctttgtgaacaatcaatggcctaataataatcattaaaagacaagttttaagatggctactttgttttttcttaattcctcactctataacaacagttacaaaacaatttgatccataaataaaaatttcaactttcgtaaataaagaacatgattcatgcaattgaacattctgattctgttaattgacataatataagtgtagaaacgggtttctccttaccagattcttgctggaaatcaggagagtgatggatacatcggaaagtggagacgacggtgaaaggcgggaaaaatggggaaccaatgagccattggagagttccaggatggttcggtgagagaagcagcttttggcaaaggactcgtacggtcgctgtctcgctcgaaggaaccatctcggatccaaaaccaaacaggcaaaatcagttttgttaactttccgttcgatgactactcgtgttcgtgagacttatttgactatgtggcgaccattatatgggcctagcccaatatagagtcatataagcccatataagtggtttattatcctttatgaaaacaatattaacatgtttcatgtatttgatgatttagttttgtcatttgatattgtgagaggacagtagttgaatgaaatgaacaccaaattaacagtcttccaaaattaacagaactattttagataatacaaatacaaaggcttaggctgtaaaaaaataaaaatactacacatattcaatgattaataaataaataaaatagattcatttctaaggtcgtagccacaaaagttttactacaatgaagttgattcaaaagttagtctcatcgtgtctcgatgttatattatttcttcttctacaaaatttcatttttcagtcttttaacgctttgccacgggtgttctctttgctcacttcttctactttgtcacttcctcatctatccatgaaacaaaaagatattgtaaaatatacatacgatatacaaaacaattaaaatttcaaaacaattaagatattacataacaaaaaataaactaaaagaaaaatagtataccatagtggtcatatgcctcatataaactcgtcggacgtcggagattgttgggttcaacaagacattgttgggttacaatggttgtattgtacaaactaactcccaactcaatccaattaacggtgttaacctaatccgagccaaatttcttttgggttacaatggttgtattgtacaaacaagttccattcacgctgaaaaactgtgaaaatatagttccatctattctcatagtttttattttttacttttatgaacggagaccattttgacattattctctattatatggttttccccaatccaaattggttacattttgacattcgtatgattatccaatattttatacatgcaataacaatgatttatgaacatagacatttgtatgatgatcatgtcatgtaaaggaatttaatagaaatctcctttaacaaatgtgaagaatcaattacgagcatttaaccggtcatttggacagaattcattaaaaacaaatcttttatttcaaattattcatttgaattcttttaagtattgtcttttatagaatgtccactccttagatatataatacaaccaattgaattgttttaagaaatcatcggtatttgccttcgctattctcgacgaagtgttcactgaaaactaaaaatgaataatgattcgtattctttgcccaaaaaaaaagaataatgattcgtacttaaggaagacatattgttttatttttttattgagagttttattgattggtgcatttacacgactacattatttaattgagagattagtttggacatggccgaccatgggtagagacccaataagcaagggttttaaaaatcaaaatatatcaatagttttgagggcatcagaatttgtaaaattccttgttgtgagctaaactttatctgtaattcttcagacatttggttttaatctccaaacagtaatttggtgttatcttttatatttacgagtcgatcttgtttaatgtgaaacaggaattctataatttgttattggaactttggtgtgaagcagaaggtgtagttgactatacaccgatatctttttactataatcatagttttaagataaatattataatatatgcatgataatttttagcttaaaataaagaacgttctaaaatacatgctaattattttgtgtgtccatagcaaaataaagaatgttatctcataagccaataaaaccagttggttatcttgctaactggtttgcggattggtcttccttcagttccagttctcttctcagatagcacagctgccatatacatcgcaaagaatcatgtcttccacgagcggaccaaacacgtcgaaatagattgtcataccgttcgggagaagcttgatgatggttcactcaaaatgttacatgtgaactctgaagatcagatcgcagacatcctgactaaaccactctttcctcaccaatttgcacatctacaatccaagatgagtcttattaacatatatgcctcatcttgtggaggactattggattatgtaattatgtattcataggtttagtccggtttagctggtttggtatcaattgtatatatactttaccttgtacagatttattcaataagaattctaaatccgtctctctcaaacactcttcttctctattcactaacaccatagcaaaataaagaatgttatctcataagccaataaaatctaggtggaaagaacctagtgattagtattatatattacgatcatgagtaaagaaattattctgatgatcgaagttgcctatgtgagcgtcacttactccgtagaccatgggagaaaacgtaaacggcaaaccatataggatttggtcagaaataaagtttgatatattagctagatttggtcaaaatttaagagtgtaagactcaattccgaattctcgacaatgcaaccttaatttgaatagaataatacatatatacaaattcatttttagaacctaagaatatggacattgtagaacaaaactaataaccacaatcatcatatatacaactgttcttcctcatcaaacttgataaaaaagaatattggtatcgctagactatttataaacctaacgttattaattggtaatagataaatcctggaaaatttgcttatattggtgataaattaagtgaaagcaaatcatgataactagactagcatatatactttgtccatgaaaatattcgctgatattggctataaatattttagtgcaaattggtagataccgtcacaattgaaccaaacagatttctcatattaacttcctattgcaatctaatgacatattgatacacacgattatatatatacatatatatatatatatatatatttgttttatttttagtatattattatattagtatgttcccgatagaaattttgctattatagcaatacataggtcttatcatcaataacccacttctgatgtcccactaataattaacaactagtataagttatcgtgtgtaaaatattttctttcggtttttgtatacgagtaaaccctaaagcaatcgatctagttaaataaattataatataatttagataaaatctccaagaaaccatttctgttgtttaatctcccaactactgaataatataattaaggtcgaatcccatgaaaataagttatgacggaagaacatattgtaaatgtaagtttggttaacttgaactcaaactatgtgacatccaaatcttttgtctcctcgatcgtatttactttttgttgccaaggtttcaaatccacaggctcctacttttgtaaagtcaaaccttttcatttctaatgatactaacattcatagcaaaaaaaaacacattgtaaatttattatttatatatctcataaggacgagtattaggatccaaatgagaccttttggtcctccacatatcatgcggacaggatcatcaatcatcactgattagtattaatgaagttggcttttagataaagtattcaaccaataatatggggaatggacatctccgagactccgaccaataatgagaaagttaatcaaatctatttatgggtcggaccgatcactatttttctgatgcggaaacttatcaacaaactttgaattttttagctttttgttttacaatgaatctatttgcattaattttaaaactgtgtttataattaaacaagaaaaatggtttgaaatgatgaattcattggcctaggacgtgagatcaaaacgccaactccaaatccaaccaagccaatgttcatttctccacgtggcgtttttaatggatcaaaatcattgcaccaaacctaatttccaacaaatcaacatttatgcggcgaacttactccccaaatccaacgtaacaatcgcactatacactttttttttttaattccataaatttcatagttcttttttctccaaatttataattatagacagggtccaaaatgtttcatgaaaattaagtaaaaaagtaattaatattaaaaatgataaaatataggtcaattacctaaaaacagagtttttctttgctataaatggtaggttaatttttctaccaacattaaaaaaaaaaaaacactattatttagtagtaaattgtagtcttacctagattgattgaggaatttaatgaaatacttttacaaaaaaaaataccatgaaacaatatatgtgattacaaaagttaatgatctatgcgattaggaagaaaatgttcgaaattcaaagctattactaagatagttaaaaatatatccaaaacggataagaacgttcgatttaaaagtcatgtattcatttatcttatggaaaatattttaatcgaacacaaaattccgttgacacagattgagtcacacaatggataaacaaaaggatcacaattggcaatacaagagggcgtgtaagattggatgagaacaaaatgccacgagggatgaggagaggtggctcttgggaagaggcaaaggtcggtttattgcaataaccggcttttctagtttttttttaataaacagctctttgacgcaaagccaaaaacaatattggtcccggatttgttcactttccacattggattgataagaaaacataaatctgcctacatggaacaaaaaggtcgtcttgtttttcggatcacaaacaaaagcaaccttataatagtcactttttttcaggaacgtaaattatgcaaatattttcattttttgttttcatcttattttcctaatgttgggaatataatacggacagtgttacacggtgtaacttacaccgttggtccagctcaatacacaaatcaaatagaacattatctatgttaaattcttatgcatgttacaccaagtcggtaatatatattaaaaggtttaaaacaaatataagcaattgaaattaaatacaaaattgagcttgttagtgggacattgtttaactaacttctcatggaaattaaactcatcactcttgctatggttgagacattgtttaactaagttctcatggaaaaaatggggcgccacttaaggtataaaccaaaatatttgcgttaaaccctagataagctaagatgccatggaaacaaaacactgggcgagttttcttctcgtgacaattatcatcaaaaattatggaacaagttgatcctaatcctaatcctcttatcaatatctttgattgtcttaaagtttttatttattttatttcgtgataattgcattgtcttaaagttcatagttgcataataactttatccccaaactttcatgatctccacggaccaaaaaaaaaaaaacttaggaattagtttaccaaaaactccaactacttaaaatttcagatatttgttgtcagtattcaaatactacactcggaagtttcgttcgactatgatacatattctcagttcttttttgatgattcatggaagataaatttgaatatgaattctcctgttcgttataaattattgtaataaagacttaaagagtgatccagcttcatctctttatccacaaatgctattcccgtcacataaaaatgccaaaaaaagaaaaaaaagagtgataatctaagtgaaaacagatcacgagcgtgttagataagaatagagagacgcaaaaataaaatagatatttgcgagacgccacgtaagcaaccaaaaggttacggtaggacccacctcgctaatgtctatataaccagaaatgtgccaaagcctttcttcttcaaactaccaaacctacagaaatctctcttcttcttcttctctacaaaatttcaatggaagctgttcttgtcgcaatgtccgtccccgccacaacggaagacgacggattttcgttaatcaccgataaactttcatataatctaacgccgacgtcggacgttgagatcgttacctccgataaccgtcggattccggcacactccggcgttctggtaagttgttatttattttggtttacggtttacatttttctggtttggtttttagctaaaatttgtggataatgcaggcttcagcttcaccggtactgatgaacatcatgaagaaaccgatgagacgttacagaggctgtggatctaaaagagtcatcaagattcttggcgttccatgcgacgccgtttcggtttttatcaaattcctctactcttctaggttggtttggttcggttattcttcttgaattttccaaatgtagaaacttcaaaccgatggttatttccggtactacacaattttcccggtttttctttttcatacacggatttgaagaaactctgtttttttttgggctattttcttggggaaacaatagctgtcaggaaatgactaaactacccttttgcgtctctgttttagtttgacggaggatgagatggagagatatggaatccatcttttagcgttgtctcacgtctacatggtcacccagctgaagcaacggtgctcaaaaggcgttgtacaacgtttaactacagagaacgtagtcgacgtcctccagctagctcggctctgcgacgcacccgatgtttgccttcgatctatgcgtctgatccattcgcagtttaagaccgttgagcagactgaaggatggaagtttattcaagaacatgatcctttcctcgagctcgacattctccagttcatcgatgacgccgaatcggtaaacttacttatatgttttgaaaacacagcatctctgtttttcttagtaccttcgataacacattttgttcagctaggtttagtttttgttccgcgctagtaaaaagataatttttttttttttaaattcagtttatttagtttggcatgttgcacaaagtttagagtattagttaactcatgtttgattagatttggtttatatacctaattaaccccaaaacatttggtcatttttctgattatgtgttgatttataatttaacgcagaggaagaaaagaaggcgacgacatagaaaggagcaggatctttacatgcaactaagcgaggcaatggagtgcatagagcacatatgcacacaaggttgtacattggtcggtccatcaaacgtagtagataacaacaaaaagtcaatgactgcggaaaagtcagagccttgtaaggcgttttccacgtgttatggtcttcagcttttgatacgtcactttgccgtatgcaagaggaggaataacgataagggttgtcttcgttgcaagcggatgcttcaactctttagactccattctttgatttgtgatcaacccgattcttgtcgcgtccctctctgcaggtatgtcccaacttgttttgttaggaatttcacatttgaaataaatcaaaaagtatgagcgaatccatttacgcttaattagtaagtttgaaattgatgatttttagtatgtttatgaataaaaaccaatgttttgttgaaagtgaaaaaatttcatttttggtaagagacaaggtttgtttatctttttgtgtagacccacctttagaaaagttgcaaattgctatgtgaattgatgatgggtcgtaatccgacggctgcaaattgttgccatttcttgaaatttgtagatattttaatagaatctcatgtgttcttttcaactcttttttttgggactaggcaatttaggaaacggggagaacaagacaagaaaatgggtgaagacaccaagtggaagcttctggtgacaagggttgtgtctgcaaaagctatgacgtcgttgtgtcagtcaaagaagaacaaatgtgaacaagcacaaggggtttaatcaaaaccaggaaggagttagttaggtttgaagaagattaagtaagaagctttcttataatttgatatccattctttttgtagtataatagtatttgttagttcgattctttattagaggggtttagtttgtataggagtaaacccttttaaattggctgtataagtaggtcatattcaattgttttgttctatttatctgaaaaatgtcagcatgtaatacaaaacaaataaatgttcaaattaaagggaggattacaagaggtgtttttaatgttattgactttggccaaaattttgaaatttagataattctatccgttgtttcgcgattacaaaaaagttgaattcaaacgtgtgttgaaaataaaaaaatatcgtgtttagcgtgattagtgattacaaagactcaaatttttgactcccaaatatgttcaataatattggtaagacattaagaacatgaaccaataatcgaccgtaaaacatctttggcgatgttttggtaaaacctaattttggttttggtgtggcttcataggcttggtgcgccgttttacccttctaagcctatgagcttctctcccgttgggtttgtttacccttttgatttggacgttttggtttttgtgttttaatttatgtctttaatttttgtaatcttttacaagggttaagtccaatgtgtttgttcccagttatgatcctaaaaatgtcaataaatatgaaaataatttgaaaaaaaaacatctttacaattacaaaacgtccatcttggagaattgaattgcactttttgtaatagtaaagatgttttactgtccattattgttttatgatcttaataattacaaacactatcctcaaaagttacaattcttggccattttgtaagtcaattaaacttgcacatagtaaagtatttaacgccatttttccgcaaagcaaatgctggccaatattacaaggagataaaaatcgtctcaatttaagatgaatacacgataaatgtgtaaactgaaacccatgaacctcaatccataaaataataaactcagtgtaagctcactagaagaatggttcgaaattcagttttcaatgacttaaagtctctagagctcgtctttaacatcatcacgaactactgactcatgagtagaaggagtcgaagagagcttggtgggataagaagcctccatggctataccgcaacgtccttcattctccgatattcctctttctatccgaacatagcctccttctccccattcaggtccccatgagttccttactatccaatattttgttccatttttggtctctccatacccaacaatcaccaccccgtggttcaactgagtcccgcattctccgataaacacaccctacagtagaatgcatagcacgttttctatagtaaaaacaatgttcggcatttgttgtctcactaagattgatgttttagattatgttcaccataaacttatattcaaaatacttaaaacatatgctttttgtatataatatgctttatttgcatagagaaaattttaataaatcaattactatacataacataaacattttaagattagagatatatttagactagatgatgttctctatatacatcttgattaatagagacttgcatactaaaccatagactattggtggcttattaacattgatatgttattttttcataactagttttctgtcgcaaacttaaactaccaaagattacctcagagtaaagctggaaatctgagctcccagcatcaatagctacagagacaggctggtgagcaacagctttgagaagttcttcctcatcattctcagggacgtgttcgtgtccatcgatggttacagtttctccaccaatactattagctctacagaattgaacgtcactggaatcgtaaggataagtctcttcggttttgatgccaccattgttctttataaattcaaacgcaggttccatgagacctcctgcacaaccttgattctcttcagtgtcacaatccacaagctcttgttcagacaatgaaaccagtttgtttgttctgatcttgtttatcccttccactgctgcaaccgtcgaaaacgcccagcaacttcctagagattaaaaattagtgattaataaatatgtttgctcaaagatcaaaccaaataaaatactctatgtacttttgaaattttccgagatagcctaaattcactcagaaacagagtaaaaaacagagcatataaagaatcatcaagaaaagagtctcttaccacaatcttgttgattcttgacctcagtgacagctcctttctctcgccaatcaacagaactcggaactctggtcacattctcatacatgaaaccaccagatccgcgcttcggtccacgaagcattcggtgatgcttaacattagagccagcgtaggagcttctaaactcgtggtgcgttatgtcggcgaatctattgatcttgagtttgtaaggcttgttctttttgttagtcctgtggacatgaaggacattgtgtctaaaaacgttgaaccgctttattgcctcgtgggaggctctggatacagagtggtggcctctccacctctcatagagcttccatacgttctcttcggtttctaattctttttcgtcgaaatcgaatccttttgatgcttggaggagggaaagaaaagagatgagaacaataaagaaaagtttcatgtctttggattcttcttcttgttggttggttggttggttggttctgtttatgccttttatggtatatgattgaggaaatgattagagatgggaacagaaatatattgtttcctcgaaatattgactgacatttgcattatttttaatttacacgtacatgtaattgttacacttgttttctccaaggacattgctaaaaattacatgtacgttttgagagttatatagtcttttcaaaaattattaaactcgtaacaacgtcaaagttaatagtcattccagaaatattacattgtaaatttctgataacattccggttatcgatataattcgtttttatggtggacttagccgcttggccggatataatatgtgtgagatcgacgaattgagaaagtaatcaagtatggataaaaaaagatagtgcgtgggactaaatgcaagaacgggtacgtttcataaacacgtgaaacacgacaaaactttatgaataatatatattgaagtctaaccaatttagatttggtagagacagttgaaagatattaaaacgcaaaaatatttggtagaaacacaatagaacacgtacgtccattcccattttcagtggatttatataaatggtaaagataagatgaagatgggttgggtcctcttcattaaattaaattatagatatttcaatggaaattattttactcaaagtaatgcaaaagcaaataagctcgagctggtgactctatacgtaccttaggctatacgacaataagtcaataattcatgttatttaatcgagttcaagacaagaaaaccaccttatctaatcgagttttatcatttcccttcctatgtccgtgaactagtgcgcggccaacaatgtttctatacaaaaatggtcttttatacatttttatttatttattctatacataaattgtttgagttaagacttaacaatattgtacgtatgtatgtatgcatacatgtatgtttgaatgcatgaatgcatgtatgtatgaatgtatgaatgcatgaatgcatgtatgtatgtatgaatgtatgaatgcatgaatgcatgtatgaatgtatgactgaatgtatgaatgcatgaatgcatgtatgaatgtatgactgcatgtatgtatgtatgaatgcatgtatatatgtatgtatgtttgaatgtataaatgcatgtatgcatgtatgcatgtatgaatgtatgaatgcatgtatgtatatttgtatgtatgtatgtaagtttgtatgcatgcatgtatgtttgtattcgtgtgtgtatttgtatgtatgttatgtacgtgtgtatgtgtgtgattttgcatgcgttgtctccggcctctttaagtgatttggaagatcccacgaagagttctttggttaatgagattggaccacatatcaatagactgtaaaatctgcaactacataagatgaaaggtcaaaattataagagcaaatttataatgaaaagaccatcatattattaaaaaaataaatcagaagatcaaacataagaaaaagattgaggacacataccttcggagaaggtttcgatttgaagaatctaaaatctgaaaacaacaaagatagaaaaaaagagcttaacatttttgtggagagagattgacgaacatatcttgaaaaacaaagaccacccaaaaaaaaaaaagaccacccaagttaaaaagaagcctttaatagatctttcgaatgtatgatttcatggctttcgatatttatataagattaaaagaaaaagtactagaatagataacttatatggcaagaaactagatcctctgttttctgagtaccgtacagacttaataaaatcagtctttcagtctcctctgttttgtgacctagatctagaagcctcattctgaaatcaaatattactatgcattcagacaacaatatgcagtaaataatgaactcttaagaaatgatgagttgaaattactatattggtgaagaattaccttaagataggcaagaccgtaaaaaaaagatggatagctgttttccataattatactaaaaagatcggcaagtgatcatttagctcataacctaacgttattctgaaacatatcatagacaaagatatatcaaggatcgaacaaagttctttgtgaatggtttaagtgatagagtgctagctaacttacatagtaactcctttttgtaattgggtcagcacataatagttcagatatcggtcatcaactagatttgtagagtagacctgcaaattaaatatttttttcatcagagtattttcccatggtacatacaacaaactaagcaaacaagcattaaattcttcccattaagagtactccaaagtccaaacacgtctcgaaggattccatgaacgcaagtaatcaataaatcagaatcacgggtcaaaaattgattggcacacatcctgttaaaacagcaaagatatttgtcaaagatttgttgttattgacacgattctgtaagaggaacgattgtcgccgtttcacatttaccctttactagcacattgggcgttagtggactatgcctttggaacaacaacgttcgccgcatctgttataacaatacaccttaactatttggaaagttaataatttgacataatatatttcgccatgcagtttaaatgaattaaccagcaataataccattaagaaagcactccatgagatctagaaagtataaggagtaggtactcacttgtgacttgttgaggaagagagataaggacttcaaattacctgaggtaagaaacaaaaaatatcacagaaattttgaagacataccaaatgaagtcaaaggagaaactgcagagaggactatcatatttatatcacacctttcatcaatacccacttagagtctgcaagaagacaatgtagaaggctgatttcaatataaattattaggcaacatatacttacgaaggcattgaagactggaaagctgatgacttatacttaaaattttacctccaaactgataatgtccaagtggtcacttacctcagagtcttaatgatttgtttgacgcctatcatacactaacatatatcattagaatagagacagagcttatgcaagagaaatgagagccatagtccatatatcataaaaggagaagaaattcctttgagaatggtttaagtgatggagtgttaacattcataatcttttttgtacttcagatttgcttgcatgaactatatttgtagagtaaacctgcaaaaaaaataaaaaaaagagcaccacatttttccattctacatacaaaaacaaagcaagcaagcataaaccatgttccttactttgaacacatctcagaggattccaaaaacgcaaatcatcagatttagtcataatcacgcatcaagattgaattggcacatatcctactaaaagagcaaaaagatttgctgttgttggcacatttgaaggaagaaaaacagttgatgccatttgacatatacctcttaccaactcattggacgggactaatagtgtctgctatgtcagtttactgtatacgtaatagagcagaaggcagcggacaaggcagaaaccagccttacgttggtacaaatgttccacatgcggatacaaagcatcgcctcaactaaacaacaagaagcgtgaaaaactgaacaaatcatattaaatttttaccagtaactgataatctcaaaaattgtttcagtgtcgttagcagagatgtatgtaattaatctaacagttataggaaaaggttggttagcgtcataactgttaagataacaactacacactgaacaaactaaaagccaaagtatatgtagcataaatgctaaacctgtagaagtggatggtcaccaaatgtaagcaaacagtaacaaaagcaagaaagttaaaggaaacaatactaactatacaagttagtgaacgaagcaaagaatggagacaagaaattgaacaattatggaagtaagcatattacaaatgtaagcaaggaagaaagtatatagagaatggaaaaagggaaacagagaagcaagtaaggaagaagtgaaaacagttaagaaagctaaagaagcaataaaaaaactaaagaaagaaagtaagcaagtcaaaaaagaaagcaaagaacgaacacaataaattaagtaagtaaatgaaggatacacaaggaaacaagtaagcgagcaaaaatcatggaaagtaagcaaggaagcaagtaagtaaacaaaaaatgaaaaaaagaaagtatgtaagttaaaaagttacgggacaaaagcaagcaaagttaataaatcaagttaacagagagcggataagggcacaaaataaaaagccaaagtatatgtatcaatgaacttgtagtaaaaccttgctaaaataggatgatcaccaaaatgtatggcaaattaagaaaactaagttagcaagaaagttaaggaagcaaataaagaacgaagcagtcagcagtcaatacaaaagaaagtaatcaagcaagcaagtaaagtgagcaagtacggaagtaagcaaattaaacacacaaaaagagctaagttagagaattgagtatgcaaataaaggggatggaagcaggtaagcaaattaagcaaagaagcaagcaaattgaggaaacaagtatgcaatgtgtataaatgatgcatgtatgtatgtatgtatgtatgtatatatgcatgtttgtatgtgtgtatgtatgtatgatgcatgtatgtatgatgtgtgtgtatgatatgatgcatgtatttatgtattctatgcaagcgtaatggttctttaagtgatctgaaagaacgtatgtagaattctttcctttctgatgtaagcccacatagtcacactagactctgaactctcccactgcagaagaaaagagacagtaacatcaaactataagagaaaaatcaaaagaacctacctaatgagaggcaaggcatatttaaaaggagatagagaatattcgaattcgtgaccattttcattatttagtgatttcttcacttatttaattcatgaccaataccacacttagaaaagagaacatttcctaatcaaactatatgccttttcaaggaagagttagatttatcaacccaatgagttcgaaacatacctttactcataagtgtttcagataattgactttgtgtacacccgatagttccacgttgtgtacacctccttggtataactagaaacaaaaacaaataccataggacccgtaaaacaagagatagtaacaaatacaacttccttaaaatctaaagaaaactggtcagagatcagtaagatttggtgagaaagaaggataagagtttatacatggtaatttgaggaacgagtaaaaccctgtaattttctccaccgtcaataagagacaaatctgagagacgcgagagttatcaagttagcgaatatatcaaatcggaaatccaattcacgcacgaatctagggtttgattttattaggatgggcaaaatcaaacgatgtatacataaaagacgatcaagaacagtgaattctagagtatttgattctataaaacctaatcgctataaaagttagggtacagacaaaaacagaaccaaacagagaaatgagatcaaatcgataagagaagaacacacacaccgtaatttttgtcatcaaatctaatcgcccagatcggaatcggtagtgatcgatcttcaagaaaccgaacaagggattgttcgataacgattcaaattcctctggttcacgatctatataaagcttttctatagcttcgactgcgagattgcaatttggaaattgatcagaagctatcggtaaaaccctagctagaaatctctttgccatgaaaaatgagatagaagtatctttttgaattctctgacgtacaaatgaggacggtgctcgtctaagtaaccgccaattttgttttctcttaatttgaaatttttttccagttgtctccgttaaaattaattaatataccaattttctctgatttaaaaaagttttcgaaaccaatcctaaattttggaaaagcgcaacataaatgcccaattataacgaaacctttttttttttatcatatattccttccgtctcacaaaaataaattttttagaacaaatttttgtcccacaaatataaaaattttatatttccaatgtaaattttagaactgtttacctattttatccttattaaataattagataaatggttattattatttttaaatagttataaaaaattaaaattgtcattatacattatttcttaaagaatgtgaattttttttaaaattcattttcatgggacggagagagtatcaatcaaaggcctaacattaatttgacctcacatctcgatagtaatagtgtaatactcaaactattgcgtttggtgcgtctaaaacacaaacgctgtagtgttaaatgaaaacttattcgccaaaagtgtcttattgctctcttgtacataattaataaacaaaggattgagaaaacacgagacatttttattcaaattcaaaaccaacaacaaaatcaaatcatgaagacgaaactaacaacatgaatcaacaaggaattgggatcacctttgatatggttttacacaatgtgtacacatatctagagctcatctttgacatcaccgtctttcggggtaggattagacgacgatagcttgatcggatacgatgcctccatcgcaataccgcaacgcccttccggttcatcaatctctctttcaatctttatatagcctccctctccccattcagctccccatgagtttctcactatccaatactttttccccctctcagatccatacccgaccgctgccacaccatggttcagctctgttccacaagatcccgtaaacactccctacaacatgttaccaaagatatgaccaaagtttatatacatgacatatgctatattattacaagatatgatatttctattacaacgaagatagtgtactgattatctttttacctctgaataaaactggaaatctgaacttccagcatcaattgcaacagatacaggttggtttgcaacagccttaagaagagcattttcgtcgttttcgggtacatcttcatgcccatctatcgtcacaagcacgccgttatcctttgaagcgtcgcattttccatcgataccttcataaggatagctatcttcagtggtgataccaccgttcttcttgatgaattcaaatgcaatctccataagacctccgttacaaccttcattctgcttagtatcacaatccactagttcttgttcagacagtgagaccagtttgttagtcttgatcttgttgattccctcaacagctgctacggtagagaatgcccaacaacttcctggtaattattcaggaattttatatcattagaattcgatcaacaaattaaagattatattataattttgtttactatattgttttaaaaaatgagacctcaaaaataattggactatctttatagtaatacttaccacattttccttgattcttgatttcagtgacagcacctttctttctccaatcaacggaggacggtaatttggataaattctcatgatcatacatgaactgttttgagccgcgttttggtccttgcaacattctgtgatgcttgatgttggaaccggtgtatgcattcttgaactcattaattgttaaatctgcaaacttgttgagcttaagtttgtaggatcggttcttcttgttggtattgtggacatgcatgacattgtgtctgaaaacgttgaatctcttctccctttcatttagactcctaggaacggagtggtggctcctccatctatcataaagcgttgataagccctcttcgctttctatttccttgtcgtcgtaatcgaatccacaagcagtttggagaatgacaagagaaaagagaaatatcaaaagaagtttcttcattttttttttttttttggttgattggttatttgtttgaggttgaaagtgcaatgagatggtatcggatatatatagggaaagagaaatatttttctgtagagatttgaaattactcaaataccatcaacgtttggaaaatgaattattattgtgtatcattgtgtatacgtcttggttagacttgtggaacttctaggacacgcatttgagaggaataaggaacccatcatattctttctaaatagtttaggataataaatcataagatttataatatatggttttataaatgtcatgcttatagatctatatgttgtgtaatatatatttatgaatgtttgatttgactaagttagctgacagtgagagaaaactgaatatccttttaaaactgaataattcaggctttcatcgtttggatgataatgatatcaatatcattatcaataattcaggctttcatcgtttaaatttgtcagggttgatggatagttttatacaataatgggaaaattaagatgaagcaacttgttgcttagggaagtaatgaaagcgataattagattaagatatgtccccaaaaatgtggagacaaagttgttcacaccatggcattgttgacctaatgccttgtacaataaaaaaaacttcttttgtataggattaaaaatgggaaaatgggaaaaaattttggtcatgtgtagacgataaaggcgatgcatataatacatgaaaatacaagaaaaatttcttctattacatctataatttggatcacacacgtgattatgtaagactccaccatttctaagatttttgtaaagatagcttttgtatccccaagctatttgcattttcgaagcttaaactatgaactttatgattttttgattagccactacgcatccaaaacttttaattccacaccacatgaaagcatcattattaattggagtagcttttaagaacacacgtcttaaaccatgcaccgagcaattacgtacaaaaataatttactaatatcgaccatttaatgagtaatgtactgatcttaagaaaacatgtttctccatgtatcccggtaataccatgtggatctacgaaaggatctcgtggcgatttttgtacatttccataccttaatctctaattagttgttattcaaaattctcaaggcaagatgcgtgaacatttggcgcagcccatttgttgaaacgtggtttcatactacatatattaaaaacaaaagagaaaaaaaactcaggccacaagataacaacgggcaagtagtttttcaaaaacacaataaaaaacaattatggcggttttatttaagttgttaggcataacattggtgtttaacaacaaatgtaatatttaaatatgaacaccgatcgtgggttaagactttctttataaaaagctaatgtcgttttaggtagtagatatgaatgaataattggaatggatcttggcttaatacccggcgtcgtggttggataatgatgcttcctaatgcaaggaaacatattttttatttttgttatttaaataatttacgttgatctcgtaatcctaggccaattgatgaatattcataatttcatatgttcgaaagagatttcacttttctgaaaaaaaaatacatatatatgtaataatttttttaattttttttttgtatgactcccacggataattgatggagttgagaaaatattgtagcttttatgattgatgtatgagtttcgaattgataattgtctcacctctattaggagattgaataattttcattttcaacatgtaccgatcttatcttggttttaagcctatgtaattacgaattaatatacgttcatttttttataatatttttttttgtataagcttgtgtatttcataagatccccaaaatgcaacgacgtggtttgatgtttcctagtttcttggaagtgactctactattttattggttatgaatattatacgttcgaaacccaaaaattttaatttacaatgacgtgttctttttctagggatcgtggaccgatccaaacagctggcgtgtctgaactgtccttaaaagcctatccaattttaaatccaaaacgttagaagattcccaaatcttttgaaagattcaaataattgaagtctgaagaggattccaatcaaaaagtccgatagaaacatttttggctacaagagttttttcccacctctaaagtcaatacttttgtgtcattttaatatatagttatttatgaaacaatctatctatataatttaccatcttaatttttatatatcgtacagttgcaaaatcattttaaaaagttttatgttgttaacatatctcaaaattagttatattcgcaaacactgtgtgtggggtgaatgtcctggtaatcaaatcggaacaaaacaaacgtattaaaacaaactttgagaaagctgaagaatcataagtcgcaagaaacaatggtctaaggatgattcttgaaattaggtctgattaccctcgggttaatacccactcaagagatttggaacaacaagtaatctcaatggtagaagcaagaaactctacgtgtcaatcttatatctagacgatcactgcctaagcaacccaattgtgtgattgactgatttcctccattaaaattttgttgatgaatgctaatcctcatttctggctaaagaaactactcaataatcagcttgtgtcgatctatatcaagtcagttacagcagaaacaaaaatgacacaaacccgccatcggatggcaaaaccaagttcttaaagaatctaatgatactaccttgatctcatccagtgactagaaaacaaccagactttaacctacaatatctcaggatctaggtctccctaaagagcttagaagagtaagtaatttcatgtaacacacttagctttagatatcaagttatatgacactatccttggtggattaatttaccaggatcaagacacttgcatgaactagcggatcaaagccttgggattgctcttaaacatgattggttcctgagaaatctgtgcataagattcgccatactcagattaaccctaaagcgaagcctacgacggtcgtgctcgtgtgttctctcgtaatcattgaggtttttgtggagtctgaatcttcaaaacgacgttttgtgtttttacgttataaacttctaaacgactacatttcaggttccattttggtgatgagaaattaaaaaaaggtgccctcacgcaggatcgaactacggaccttcagtttacaagactgacgctctaccactgagctataagggcaactttgctcagttatctgtgatgtgcaaaaaaattcaaaacctcaaagaacagacattttgggccatatatacaaaaggtaaaaaatatgggataaatgctaaaataagatagagaaatgttgcaaacaaaaagaccataaagtagcaaaaacaaacattttgggccaaactgataaagaaaaatagtttggggatacaaataagaaatactaaaatataaaaaagctgtggggaacgttgcaaaataaaattccccaaaaacacgcgcacgataatgattccctttactcttgttgcgtgcaatttccgctattatgcgcattcgtcatcactttcccattcctctccgatcagttcttctctctctcacactgcttttgcctccattgaacccttcttctctctgctcaccggaatatttctctcacaaaagatgaaggtactctttctctccgatgtgtaatcgattcgattcgaatcaagataagtaattgcgatttccattgcccaatcgattcaatacttgagaattttcgattgagatcactacgattgtcagatttaattattggttctgttttgtaattgattctgtagcaattctggagtccaagtagtatcaacaagaacaaagctatggttgagaatctgcaaaatcatggtatagttacttcagatgaagttgctaaagctatggaggctgtggatagaggcgtatttgtaacagatcgttcctctgcttatgttgatagtcccatgtctattggttataatgtgactatatcagctcctcatatgcatgcaatgtgtcttcaacttcttgaaaaacatttgaaaccgggaatgcgtgtacttgatgttggctcgggtttgttttactttctcttcttgaattagttttgtacattcttcttcttgcttttgaatatgatgaattttgatagggaccgggtacttaactgcttgctttgcggttatggttggaaccgaagggcgtgctattggtgtggaacatattcctgaattggtggcttcttctgttaagaatattgaagcgagtgctgcttcgccatttctgaaagaaaggtctcttgctgttcatgttggtggtgagcatcagttcaagtttttgagatttctttggtgtttctgtttttacattgctggtttcttgatggttttaaaatagatgggaggcaaggatgggctgagtttgctccgtatgatgctattcacgtcggagcagcagcaccggagatcccagaggcgttgattgatcagttgaagcccggtgggagactggtgattccggttgggaacatattccaagatctgcaagtggtggataagaactcagatggttctgttagcatcaaggatgaaacttcagttcgttatgttcctttgactagccgtgaagcccagctgagaggggactgatgaatatgctcgttgtacagatgaatgaatcaagtaagctcagtcgcctttctaaattagcatagttagttaagaactcaaatcactgtgagtaaaactctcaaatgactaaacttgttttggtacaactaaacataataaaccatttatatataatgcctccatcaagtagtagatgatgcaatggcgtaaagagggaataaacggtgaatcaccataccggttgattcagcgacattggtttgattttctttagaatcctccggtaatttccaatcataccgatgcacaaagttagccaaagccacctcaatcaagaccactgcgaatgatattgctggacaaatccttctccctgctccaaatggaaccagctcaaaattgtgacctcggaaatcaacagacgaatctaaatgtctctccggtctaaacttctctgcgtctggcccccacgtcgcagcctctctcccgattgcccaagcattgatcattacctgtgtaccggctggtatgtggtaatctcctaatataacatcttgtattgattcgtgaggagccaacaatggaagtggaggatgtagcctcgttgtctctttgattacagcttttaagtagctcatgttttgaatgtcttcttctgatacactcaaattacccttacaaatcgtacgaacttcttcctggagtgtgcgcagacactctgggtgacgtagaagctctgtcattgcccaatccataagtgcgtacgatgaatccgtaccagcaactaaaacatcctgaaaagcgatcaaaaccaaaaaaacaagaactacggttatacactaaaacatcaatgaatatgaatatgagatcttcttatccctttaccaagacgatagcctttatgcataaccggtcgatttcaaatccgatgctcttctctctctgaattctgagcaacacatccacaaaatcagtcctttgtccgtcaccatctacatgatcttgaacaactttctccaagaattcatcaagatcattgcctgtcttatttagctgtccatccaaaccagagatccaatcaatccatccaagccatggtacataagtccccacactaaactcgcccattagcatcatgagccttttcattaactctttagaatctgtttcaccgctatatttccgtcccaaagcaattctagatatcacatcgttagttaaactccccaagagctcgcttacattcacttgcaaagaacttgatttctggatcttctccatcatcagactgatctcttcttgtctcacatttcgaaaggacgtgaccattttgttgctgaggagccggaggacgcacacactctttatttgcctccaatactctccataaggagcgaaggccacatcacgcccgtcataaaatagcttctcgaagagttttgaccgtggacggctagcaaaaacgcgatcatgcgtcttcaaaatatctctagccacgtcggcggaagagactacaagaactgggacacggcctaaatggaggagcatgagagggccgtatctgtggctgagagagcatagtgatcggtgagggtggtggccgagttgatgaaggtttccgatcaatggaagtctcggtggtgaccgaggtgtgttgcttttcttccctcttttctgttttttgaaaaagaggatggtaataaagattattaagctttgcagaattatcattgtcatggattccatgcttgtattcttcaagtttcgtcaagattttcttgtaaagagtatctaagaattttgtggtcttcttttagaacttagatgagctgagtcatatggaattagagattgcatacagaatgaaccacacaatatctctagtaagccagaatttcgttttcttctgtttgactaatgtatacaattatagaagccaagtttctcctgggaccaaaactctgtccactcaaaattttcttatttctctgccccacatggataagaaaattcaactattacacgttcttattaagagtttgacaaagaaaaaaaaaacgttgaatctttcaaattgtcttagtgaacaagttctctttgaggaacaagttctctagggtttctcatctaatccttttacgatttggattgctctttttatgtatgcgcaaagaagaggagtttcacgtttataatttctttctccaatttctttcaaggtaaggcgccctaattaaaccctggaaaatcatgacatttaagaaggtcatcaacataacaatggagagagaacagatacaaccaagtaaaactatgaatatttccacttatacttattcaaactgtgaggtagacagtcatgcaagcacgtcaaagtaacaaatagcatagtcacgcaaaactactgaactaatggaattgaatgtgttttaaagtcaaggcgatatccactgttattcaattatgtatttgataaaataaaacccacaaagaaaactgcaaattcaaatacattaattcaataacaacccctaagtagtaactagtaaataacacaaagttgaactaaacaaaccaatcaagctcattaacgagaaattaagaacgaatcactcaggaaaaaatatcaaattggttcgtgttttagtttctctctaagtttggagattttctatagtgtttttaattttattattaacgcgtcatttgaaagtgttggattcctcaaagtcgttgctttggtcgttaatattgcaacacttattattgttgtgagttttagttagctactttagtatatagctatccctcaatctggtttcaataatggtctacaaagccactaaactacttatcagaatatttaataacatcacacaaaaaaaaaacacaaaatttgaactaaatataccaatcaagctactaatttacagtcaactcgaactgacctctgcgcagtgctattatgcgcaatcgtctaatgattggaaataatttgaaaccgggtatgcgtgttcttgatatcagcttgtgttcttgaagcccacttgagaagggactaatgatgcttgttgaacataacaataaatcaagtaagctcacctggctttctaaattagtttaggaacttgagactttaaaatctcaaacttctctttggtagcaacattttcaaatgagtaaacatgtttattgtagacataacataatagtaagcatttatgtataatgcatccatcaagtagtagatgatacaatggcgtaaagagggaataaacggtgaatcaccataccggttgattcagcgacattggtttgatcttctatatattcctccggtaatctccaatcataccgatgcactaagttagccaaagtcacctcaatcaagatcacagcgaatgatattgctggacaaatccttctccctgctccaaatggaataagctcaaaattgtgacctcggaaatcgacagacgaatttaaatgtctctccggtctaaacttctccgcgtctggtccccacgtcgcagcctctctcccgatcgcccaagcattgatcattacctgtgtacccgcaggtatgtggtaatctcctaatctgacatcttgtgttgattcgtgaggaaccatcaatggaagtggaggatgtagcctcatagtctctttgatcacagcttttaagtagttcatgtctttgatgtcatcttctgatacactcgaatttcccttacaaatcgtacggacttcttcttggagtctgttcagacactctgggcgatgaagaagctctgtcattgcccactccataagtgcgtacgatgtatccgtaccacccacaacaacatcctgaaaagttaccaaaacacaagaactacggttatatactaaaacatcattgaatatgaatttattttcttcttttctgttttaccaagatgattgcctttatgcttaaccggtcgatttcaaacccgacgctcttctccctctggattctgagcaatacatccacaaagtcagtcctttgtgcgtcgccatcttcatgatcttggacaactttctccaagaattcatcaagatcattacctgtcttttttagttgtccatccaaaccgctgatccaatcaatccatgcaagccatggtacataagtccccacacaaaactcgcccagtagcttcgtgagccttttcattaactccttaaaatccgtttcatcactatatttccgtcccaaagcaactctagatatcacatcgttagttaaactccccaagagctcgcttagattcacttgcaaagaacttgatttctggatcttctccatcatcagactgatctcttcttgtctcacgtttcgaaaggatctgaccattttgttggtgaggagatggaggacgcacacgctcttcatttgcctccaatactctccataaggagctaaggccacatcacgggcctcataaaatattttctcaaagatttttgaccgtggccggcttgcaaaaacgcggtcatacgtcttcaaaatatctcgagccacatctgcggaagagactacaagaacggggacaaggccaaaacgaaggagcataagagggccgtaacgattgctgagagagcatagtgatcggtgagggtggcgaccgagttgatgaaggtttcctatcaacggaagtctcggtggtgacgcaggtgtgttgcttttcttcccttttttctgttttatgaaaaagaggatggtaatgaagattatcaagcttagcagaattatcctgatcattgattccatgcttgtattcttcaagtttcgtcaagattttctagtaaagagtttctaagaatttgtggtcttctttttgaacttagatgatctgagtcatatggaaatagagtgaacgaaccacaaaatacctctagtaagccagaatttcgtgtacctcttttggacttatgtatagaagccaagtttctcttgggaccaaaactactgtccactcaaattttcttatttctctcccccatatggataattatcattcttctcaaaattcatttatttaacgtttgacaaaaaaaaaacgttgaatctttcaaattgtcttagtgcacaagttctctttgaggactaggatttctcatctaatctttttactatttggattgctctttttagatatgtgcaaagaagaggcgtttcacgttaataatttcttgataggtgcaaggtaaagccctaaccccggcaaaatcatgagatttaagaatttcatcaacaaaacaatggagagagagagaacaaatgcaaccaagtaagactaagaatatttccacttacattaattcaagctgtgaggtagagagtcatgcaatcacgtcaaagtaacaaatagcagagtcaagcaaaactactgaactaatggaattgaacgtatattaaagtcaaatgcgataaattaattcttattggattaagcatttgtaccatgaggttttaaatacaacaaaatcacctgttattcaaattttttaacaaatcattagatttttactttaaacaaattttgatgtatactttcacctctttcacgactaatccaaatcagagctctctaatcagttttctgtaatcaaatttatttatattttaaagttaaaatataaaaaaatataaacgttataaaatctaaaatctaaaaaaaaaatgatgcttgttgtacagaataatgaatcaagtaagctcaccttgctttctaaattggtttaattaggaactcgaaactttaaaatctcaaacatatcttagcttacaacattttcaaatgaacaggtttattgtagacataacataataataagccttaatcaagtagtagatgatggaatgacgtaaagagggtgcatgcggcgaatcacactaccgattgattcagcaacatcggtctcatcgtctatagattgccaatcaaacccatgcactaagttagccaagactacctcattcagcaccacagcaaatgatattcctggacacatccttctccctgctccaaaaggaatcagctcaaaatcctgaccccggaaatcagaaggcgactctaaatgcctctccggtctaaactcattcgcatctggtccccacgtcgcagcctctctcccgacggcccaaagattgactataacctgcgtaccggcaggtatatggttatctcttaacctaacatcttgtgttgattgatgaggaaccatcaatggaactggtggatgtagcctgagtgcctctttgaccacagcttttaagtattccattccttgaatgtcatcttcagacacacttgattttcccttacaaatcgtacggacttcctcttgaagtttttttagacacgttgggtgtcgtagaagctctgtcatttcccattccacaagcgtggaggatgtgtctgtaccacccacaaaagcatcctgaaaagtgaaatcaagaccaaaacaattaatggttatatacttaaacaaataatggttatagacataaacaattaatgcatggttctacactaatagtctaaaacattggatttgaatttgatatatattttttcccttaccaagacgattgcttttatgcttaaccggtcaatatcgaacccgaaactcttgtctctctgagctgcgagcaatacatccacaaaatcagtcttgtcgccgtctccatcttcatgatcctgcacaattctctccaatagcttatcaaaatcattagcggtcttttccagtcgagcctccaaaccgctgacccaatcagtccacgcaagccacggtacataactcccgatagtaaacgtaccaagttgcctcatgagcctgtctattaactctttaaaatctgttccaacaccatatttccgtcccaaagctactctacatataacatcgttagttaaactcgacaagatcttgctaagatttaccggtttagaactcgatttacggatcgtttccatcatcagagtgatctcttcttgtctcacgtcttgaaaggaccgtaccattttgttgctgaggagatggagaacactaacactcttcatttgtcgccaatactctccataaggagctgaggccatattacggctcttgtaaagaagcttttcgaagatttttgaccgtggacggctagcaaaaacgcgatcatgcgtctttaaaacgtctcgagctgcttctgctgtagaggctacaataacggggacacttccgaagtggaggagcatgagtggaccgtaacggtggctgagatagcagagtgatcggtgaggatgttggctaagctgatgaagatttccgatcaacggaagtctcggtggggatggaaagttgatgattttgttcactgtcttatgttttttgaagaagagaatggttatgatgaacaatattattaagcataagaaaagtatcatgatcatattttgtaaacttggattcttaagttcttcaagtttttctcgtgaagagtttcttaagttttttgtgttcttcttgtggacttcgccacttgcgttatatataagccaagtttcttctatgcgttacgtaacgagggtccactcaaattttcttctgttttgcccaagtatagtaggaaagtaaatttgcattaaatatatattctctcaaatcctatatagtaaaggtaaaaaatctctccacaatacaagtaagttgaccaaacaaaaaagaaatcttttactttttttaatacctattttgctagattttagacagctacaaggtccaagaaaactatttatctcctaaaatatatagtccttatttgtatattaataactttttaaattttaggtatgattctaccacctatttgtttgtaaatgtagaatatttaaatatcaaagctaataactttgaagaaatatgtgaaaacacaccaaaaagtaactcacctctaatctaaggcattgacatatctcttttcagcctcggaaatttggtaattgtttcgatttcatcaacaaaagcgttttactgtctttcattttcctcaattatattgtctaatacttcaagtcttctagacaagcttttgtaataaaactaaagcatcaaattccagaagtctattatattttcataaaatcttaaaatcttcaccatattatattttcatagcctattaatatttagataaaactgcaaaaaaaccttattaaactttataaaaaaacatttattgattaacccatgtatcaaatgggttctgatctagtaacataatataaatcattttaatgtatataatgccttaatcaagtagtagatgatgtaatggcataaagaggaaaacaaattagacggtgaattagggttgatataatccaatcttttccactttttaatatatagtcttaaaataggaagataaaaatcttataaaaattttacaagatcgaaaggatatcctaaagttccagaagttttaatctgatcccaccctaattaaaatatataattgatttctgtttgttttttttaagttttgcatgcatacatggtctctatctatatcttatatttactcatttatgtctacagtggaacttatactaagagcctaattgagaaggaaacatcgatctgttatattccgttgataattgcgagggaactgattatgccgcttggcttacttaattagtgtggttacttttttttgagtcaaactattagtctatagtttacttaagaactcaaatcttaagatctctttaccactgacatgcgtattgtacgcttctaacaaagcatatctatatgctgtaatgtctaaatcaagtagtcatggcgaagagtgggaacatgcgatgaaccgccataccggttgattcagcgacatcagtctgatattctgtagattcctccggtagtgtccaatcaaactgatgcactaagttagccaaaaccacctcatccaataccacagcaaatgatattgctgggcaaatccttctccctgctccaaacgggaccagctccgtatcctgacctcggtaatcaacatacgaattcaaatgtctctctggtctaaactcttccgcgtctggtccccatgtcgcagcctctctcccgattgcccaagcattgatcattacatgtgtaccggcaggtatgtgatagtctcttaatttgacatcatgtgttgattcgtgaggaaccatcaatggaagtggaggatgtagccttagtgtctctttaatcacagcttttaagtatttcatgtcttgaaggtcgtcttctgatacacccgatttgtctttacaaaccatacgaacttcttcttggagtctgtctagacactcatggtggcatagtagctctgtcattgcccattccaaaagagtgtatgttgtgtccatatcacccacaaaaacatcctgaaaaccaaaacaagaactatggttatatactaactcatcagtgaatttaaatttgttttcgtatcttccctttaccaagataattgcttttatgcttaaccggtcgatttcaaacccaacgctcttctctctctcaattgtgagcaagaaatccacaaaatcattcttgtgtccatccccatctacatgatcttggacaaccctctccaagaattcatcaagatcattgcttatctttataagttgaccatccaaaccgcggatccagtcaatccatgcgagccacgatacataactcccgacactaaactcgcctagtagcctcgttagccttttcattaagtctttaaaatcggtcttaccgccgtatttccgtcccaaagcaactctacatattacattgtttgtaagattcaccaggatctcgcttaaatttatccgcaaagaactcgatattcggatcttctcaatcatcaggctgatctcttcttgtctaacgtctcgaaaggatcgtaccattttgttactaaagagatggaggacgcacacacttttcatttgcctccaatactctccataaggagctaaggccacatctcgcccgttgtaaaaaatcttatcaaagatttttgaccgtggacggctagcaaaaacgcggtcatgcgtcttcaaaacgtctttagccgcatctgcggaggagactacaagaacagggacactgccaaagtggaggagcatcagaggaccgtaacggtggctgagggagcataatgatcggtgagggtggcgcccgagctgatgaaggtttcttatcagaggaagtctcggtggtgatggaggtgcgttgctcttcttccctctcgactgttttttgaagaagagaatggttatgagtattattgagcataagagaagtatgatcatcatcatcattttcatcactggattttttaagaaaatcgttttagatttctgtgtgggtgaggctgagctgatgaaggatatcaattattaaagggattgatttttgcaagaatagacagtttcacatgttttctaaacatacactagctacattttctcatggatgtgttatacttttcagtttctcataagcccaagcttttatttagttgatggcaattaaagtgcctaagtaacgaaattgtggacgtgaattaaaattatttagacgtaacaaacataacatctaaaaacaaaatattttttgagtcatgtgggcaatattaagttttccttgagagttgggacctaacttggatgtcaattgtagacgcgtgctgcgtacatgtgagattattctatttgtagtgggacaatggggttttcaatcctttaatcactcacatgcctaaggatttatggcaattctaaagcatgtgcattattgtcacattgatttgtgaattgtgtgatagcagcagggcatatctattaatcatgtggttagtttgtaataaaaccaccaaactaactaaaaaaaaatgcattatttttaatctttttttttataatatataacgttcactttttccgtttcaaagaatagtttcggactttcggttgagtgattcacaatttcctctaaatataataaaaataacatttaaatccattacctttttgaccaagcatcaccagattttggcttagtaattacctcgaagaacagtttctagcgttgaactttttatcctcttcataagaattttttttctggaaaagaatgctaaacacactacaaattttacaaaacgttttctcgaactctagagaaaaaaggcgtaacctctagaagaggtagttttgctataggaatttcaaccgataacgagtgatttttaaaagtcgattattttataacaaatgcttccatgaaaatcctgaaaacgttacgttatgccgattttgatacgtaagaccatctttatcggtgatactttgagagtatttttaaattaaaaattattgagaaaaaaggaagaaaatatctttaaatgtgtaatagtgtcttttaaaaagacatttcagacctccaaatagaagtctcctttaaatttaattttaatttatttttaatacacttacaaagatataaccaatgtggattctcttagcgctcgtaaaatgaaaagaaactttcgtaaaatagcaaatatttggaagagtgagagtacgtaacttatgtgagcgagagagcaaagatgatttgactaaaataactaaaatcacataacaattaacgaaaacaacttagagaagaaaaacacatatataaaaccagaatccatgaagagaaagatccacaacataacataccaaagcattaatatatataaatgcctaagtcaagtaaggtgatgcaacggcataaagagggaactcgcggtgaaccgaaaaaccgctggattcagcgacatcagttttgtcttctttagattcctccggtagtttccaatcaaacccatgcactaagttagccaaaaccacctcattcaataccacagcgaatgatactgctggacaaatccttctccctgctccaaatggaagcagctcaaagttttgacctcggaaatcaacagacgtatctaaatgcctctccggtttgaactcctccgcgtctggtccccatgtggcaacctctctcccgatcgcccaagcattcatcatcacttgtgtaccggctggtatgtggtagtctcttaatttaacatcttctgttgattcatgaggagccatcattggaaatggaggatgtagcctgagtgcctctttgatcacagcttttaagtatttcattccttgaatgtcatcttcagatactcttgacttccccttacaaatcgtacggacttcttcttggagtctgttcagagacttcggatgacgtagaagctctgtcattgcccattccaaaagcgtgaacgatgtgtccgaaccacccacaaaaacatcctgaaaaaacaaaaaacaagaactaaaattatatatgctaaaacatcataaaatctaaaatttgtatcatccaaaaatgagtattaattgttcctcaccaacgtgattgcctttatgctgactcgctctatctcaaacccgggactcttttctcttttaaccctgagcaatgcatcaatcaaatcagtcccatctcggcggtcaccatcttcatgatcttgcacaactttctcaaagaagtcatcaagatcctttcccatcttatctagctgagcatcccaaccgcggatccaatcaacccacgcgagccacggtacaaaactccctatactaaacgttcccaatagctcgcttagtctatccgttaacttcttaaagtcagtttcaccaccatatttccgtcccaaagcgactctacatatcacatcgttggtcaaacactccaagaccttgcttacattaaacggcaaagaactcgatttccggatttttgccatcatcaaagtgatttcttcttctcttacatctcgaaaagatcgtaccattttgttgcttaagagatgaatgacgcacacggacttcatttgcctccaatactctccataaggagctgaggccacatcacgattgttgtaaagaagcttctgggagagttttgaccgtgggcggtttgcgaaagcttggtcgtgcgtcttcaagatttcttgagccatgtccgcggaagagactataagaacggggacacgacctaagtgaaggagcatgagaggaccgtaacggcgactgagatcgcatagtgatcggtgagtgtggcggccgagctgatgaaggtttccgatcaacggaagtcccggtggtgacggaggtgtcttacctttcttcccactcaactgtttttttaagaagagaatggtcatgaaaattattgaccacaagagaattatcatcatcatcattttttttattattttggtttcacagttcttagagatttctcttgttaatttatgttctgttggacagggttatataatcaaagtttttctacgtatgttacgttactagggtccactcagattttcttctttctttgctttaatgggcaaaataaaatttcctctcaaatggacaaatcctatgcctaaaaagcaaagaaatctctacaatattactgacaacccaatcacacatcacaattaaactgaaacaatccattttgctattcaaagataaaataaacaaaaataatattttaccaaaaaaaaatatatttcatcttctacttctatatgtttgattttttaatagccacagaattatttatctcttaaaattatataccttattagtatatttcaaataactttcttaaatacaataatatcataatttgtatatttcgaataccttactttgtagtcataaaaggtatccagtaaaaaggttttgcatgtctggattctgtaagttctttacacaaaattcttgtgagttttaaagttctttttgatcttttggacttatgcacaactttacactttacgtaattaccactcaatttttggatttatgtaatatatacatccacagtgcaaattattaatggatgcacaaactaaacataattatataacaaatacgacaaccaaaatttgtatcttaaataaatctgattttaacgtaattgtatattttgaaatcgaattaatcacaattttctaatgataaccaactttgcatttatttctacaatattaattatataacaaatattaaattttatcatgcttttaaataataaataagataacacaatttatatattcaatacaaaaaatgattagacgtactactagtaacactaaatttttaaataacacaatcagacgttctactagaccacctatagttttgcttgaacactaatagaaattagaaacacatacagataagacgattatttcgggtcattccacctttttttttttttatatatataaacataagctcagaatagaaacaaaaagatcttgaacattttttcggatggtttcggtcacaatatgaaagtactgtatctcctagttagctgtataatcgttttgaaaggaaccaatagatctaattgtgattctacttctttttttaaaaaagaagtttgataaatacgttggacatacttgtttttttttcgtcctgattggtaatttgttttgtggagtccaagcaatatcaacaacaacacagctatatggtggagaactcgcaaagttatggttgcacatttgaaatgagtaaacgtgtatgtttatcgtacacgtaacagaacaaagcatttctatgattctatatatataagatgcctaggtcaactggtcaagtagtatttgatgcaatggcgtagagtgggaacatgcggtggatcgcaatacccgttgattcagcgacctcggtctgatcttctgtagattcgactgataatctccaatcaaaccgatgcactaagttagccaaaacaacctcattcaacaccacagcgaatgatattgctggacaaatccttcttcctgatccgaatggaatcagttcaaaagcctgaccccggtaatcaacagacgaatctaaatgcctctctggtctaaactcctccacgtctggtccccacgtcgcagcctctctcccgattgcccatgcattgatcaatacctgtgtaccggctggtatgtggtgatctcctaatctgacatcttgtgttgattcgtgaggaaccatcaatggaagtggaggatggagcctgagtgcctctttgattacagcttttaagtagctcatgttttgaatttcttcttctgacacacttgatttatccttgcaaatcgtgcggacttcttcttggagtcttttcagacactttggatgacgtagaagctctgtcattgcccattccataagtgtagacgatgtatccgtaccacccacaaaaacattctgaaaagttaaaaccaaaacaagaactactgttatatacttactaacacatcatgttgtaaaaaaaaaaaaacattacacaataaaacatcataaatctgaattggtatcattcaaaagtgtgtttcctcaccatgacaattgcctttatgctaacacggttgatttcaaacccgacggtcttatctctttgaatagcgagcaatacatccacaaaatcagtcatatctctgtttccatcgacatgatcttgcacaactctctcaaagaacttatcaacatcgtttgccgtcttttctagttgacagtctaaaccgcggatccaatcaatccacgcaagccaaggtacataactccccacactaaacgtccccaatagtttatttagtctctccattaactccttaaaatccgtttcaccaccgtatttccgtcccaaagcaactttacatatcacatcgttagttaaactcaccaagatcttgcttagatttaccggcaaagaaatcgatttcctgatcttttccatcatcagactgatctcttcttctctcacttctcgaaaggatcgtaccattttgttgctgaatagatggaggacgcacacacttttcatttgcctccagtactctccataaggagctgaggccacatcatgcttatcgtaaagaagtttctcgaagatttttgaccgtggccggcttgcgaaaacacggtcatgcgtcttcaaaacgtctctagccaattcagctgaagatactacaagaacggggacacggccaaagtgaagaagcataagaggaccgtaccggtggctgagagagcatagtgatcggtgagggtggcggccgagttgatgaaggtttccgatcaacggtagtcccggtggtgacggaagtgtgtttcttttcttccctctcttctgttttctgaaaattatgatggtaactacaaagattattgagcataacagaaagaacatgatcatcatgtctggattcttcaagtacatcaaaacgtgttcttgtgaagagtttttatttgtggtttttttggacttacatatacaagccaagtttcttcacggtagtactagtacgtaattactgtccactcaatcttttggacttatgtatttatgcatgcaccagtcttttaatgtttagttcttcgagatttttccttgtgaaagtcatttggtgcgtttacgatttatgtcttattttggtcgtgtcaccgttctagtctttcggtgcttccacgatgtgtcttaccaccatacaatacaagtgcctaggataatggtctcaggctgccgtcagctctaaggatttatatactctgggcccaatgggccttacaaaaatttgatgatcattgtatataatcggtttttaaacggctgaaccgccaattcatactcatcaaaaatacaacgacaacattgttcaacaaacaattctccatgaaaatttaaatgtcctaattcgtctcaaacattctgtctccaatatgtaaaacatttatattttgagatataagtagaagtaatagattataacaaatgatcataacattagtgtagtgatttgtgtcagtacaagtttctatttaaagtgtaacaacattgaatatttatgtttcaccaaaaactatgactattattctattaatcctgagagagagagcaaaaccctttagtgaaaagtttccttaagtttaaaagaactgaagctgaagtccaaattgttgtttacacacagtaaaatcgaattcgttaccatgacaagcgggttcaatggctaaacattttgtaatttaccaaacccattattcgatttgtaggatagtcaattatagggttcttagtcagctaaaacagtgacttaagagttaagaaggggaaaaaaaaagtccgaatattttatattcacaacaccatgaagttgactgaataagcaaaataattgattagagtaacatgacaataaatgagaagaaaatcaaataaaaaaccagatccatggcgcgaaaaaagcaacgacccacacctttgccacgtggtcttgtccagtggatctgagtgtcctaaattcgaagatgagaaagagagagagtgtacaacattctacagtcgacaccattatgatcagcagctggaaaagcttaagcttggttttaatggcacaaaatctaaataatcgatttatacacaaaaagacagctaagtaatgattattattattatcagaaactgcttcaaaacttgttcttccttgactaaatttctctcttctctcaagaactcctatcatctgttttgaattgcaagtaaccaagaatgcgacaagacgagaataactccgaggaagaattcgttgagattgatcccactggtcgctatggccgggtctgttcttctttacttgattttagtgttacctttttctcaattctaatgtttttgtttctcatgttttcagtataaagaagttctaggcaaaggagctttcaaagaagtgtatcctttttcttagatctctgttattactacagagacaaatcagattagattcggacaagacacagtcactaaagggtttctttgatcagagagttcttcagatacagagcatttgaccaacttgaaggaatcgaagtggcttggaaccaagttaagttagatgataaattctgtagctcagaggatttagatcgtctttactctgaagttcacttactcaaaacccttaaacacaaaagcatcatcaaattctacacttcttggatcgatcaccaacacatgactatcaatctcatcaccgaagtcttcacttccggaaatcttagacagtcagattcctctctcagaagtcaaatcaaatcttttttatttgatcaatattattcatgtttgacaaacccttataggtaccggaagaaacataagtgtgttgatctaagagcattgaagaaatggtcaaggcagatcttagaagggcttgtttatctacatagccatgatcctcctgtgatccatagagatcttaaatgtgataacattttcattaatgggaaccaaggtgaggtcaaaattggagatctagggctagccgcgattctgcaccgcgctcgctctgctcatagcgtcatcggtgagatctttaatcttgttctcaaacgaaaaagtttctccattgtgaaactataattttgtgtttgaaattgtttaaggaactcctgaatttatggcgccggaactctatgaagaggactataatgtacttgtcgatatctacgcgtttggaatgtgtttgcttgagctggtaacttttgaatacccgtattccgaatgcacaaatgctgctcagatttataggaaagttacatcggtaagtgatcatattcccatctcatatccaatcaagaatgactttttccatattgtcgatccatttttctcaatgcttcttagggaatcaaaccagccgctcttttaaatgtgactgatccgcaagtgagagcattcatagagaagtgtatcgcaaaggtctcgcaacgcttgtcagccaaggaactacttgatgatccttttctgaaatgctacaaggaaaataccgaaaacgtcagctctcacaaaggtaatatcagattatggtatttcatttcatctcaatatgaagtgtcatggactcctttcttaaaagttaaaatcaataatagtaacataagatagtttctatattttttctatgtgaaattttctaacaccaagttcaataacattgtcacagaaaatggttacaacggaaacggaatcgtggataaactctcggattctgaggtaggcttattaaccgtagaaggccaacgtaaagacctcaacacaatcttcctaaaactacgtatcaccgattccaaaggttcaaaatcttttttgctttttttattacaaatcttcagatcattactaaatcttcttttgacacaataataacattttttatacaggtcaaatccgcaatatccacttcccatttaacatagagacagacacatctttctcagtcgccatcgaaatggtcgaagaactagacttaaccgatgatcaagacatctcaacgatagctaaaatgatcgacacagagatacattcacacatccccgattggaccccttctcgacttatcggtgatgattcagcggtacaaaaatgtttgtcttctccagagacgctccatttagatagatttccttcagggagaaaattctggtcctctcctaaagctggagctggagactcacgttcaccgtttgcgccacggtctaattctaagttgtcgtcagcacaaggaccgatcaatcaagaagttggggttatagtagagaaacttgagtctttgttgaggaaacagagagaggagattgaagagatgcagagagatcaagaacgtattgttactgagttcttaaaagagtttcctcctgagatttgtgaagaggctttggtgagattgcaagttaaagattctgataacttattgtgttagtacgttttttacattacacactctcgtcaagattaatttggtttgcaatattatgttgtactaaaggtaagtaaatgtgtaacaaaattgtgacagttatgattgaaggaaaactatttgtcaaataatatttcttgaattagttaggtgaagacgtaactagctcagaagagtctgggagaagaaaagaacgcggtgatgataggtcacatcactgtgttcttattcacttgattcttctgagctagcctcgtcctcttcacccaactcttatgaaccttactcgtcttcactggactcacttgcagagactctaataaggttgtcttatgatctatgctcgcctctcataatcttagaagaagatatagagcggttcatattttgttctctctcgcctattaggtttaatgggtactggtgtttcttaaatagcgtatgcctcaagataatatattagggtttcatagataataaacctaatcaccaaaacatttggcataaatgggctaaaagcccaaaatttcataaaactaccttaaaacatctttataggaaagaaagcgtttcagggagtaagcaaatataagcatatggcagcgtcaaggactcaagggatccaatcaaaactacaaagagcaaataaataatcaaaacaaaaactgaaataaactaaattctcatacttgttcaggaattggtttctgatccgtcgaagcatgcactcccttgctctgccatgaagaaaacatttttccgatcaattctagggcaccgagaaaagccctcaattttcataagaactaaaatcgaaaagtaatttaagttaaattgttcttgttggtaagcgattccgggactggacccaaatatctggcataaatgggcttaaaagcccaagccagaataaaccaacttgaaaatatcatatcacagcattaaaacgcagcgtttcaggagttaaacccctaaattttcaggaaaattgcatttttgcttaaaccctattattgtcactttctcttcctctccctcttccttattcgaaaacacacaaaatcacagtagtagcatctgtagccatgtacagatcaatggcaatcctgtcttctcttcgacacgcgtactcacagatctctactcgatcgtatctaagccgatctaaggtgggtttttcctcaaacttgtcttcgcctctcgattcatttgcaatcgtccctagtcgatttctttggaaatttcgaaccttttcttcgaaaccagattctatgcttcaattagtgcttgagaatgattggtctaaggaagtagaggaaggattgaggaaacctgatatgtctttgacacacgagactgcaatttacgttctgaggaaattggagaagtatcctgaaaaagcttattactttctcgattgggttttgagagattcagggcttagtccaagtactccactctatagcattatgttgaggattttagtgcagcagagatcaatgaaacggttttggatgactctgagggagatgaaacaaggagggttttatttagacgaggatacttataagactatttatggtgagcttagtaaggagaaatcgaaagctgatgctgtggctgtggctcatttttatgagagaatgcttaaggagaacgcaatgtctgttgttgctggagaggtttctgctgttgttactaagggggattggagttgtgaggttgagagggaattgcaggagatgaagctcgttttgtcggataattttgtgattagggtgttgaaagaactaagggaacatcctttgaaagctttggcgtttttccattgggttggtggtggtggtagttcttctggttatcaacacagtactgttacttataacgcagctttgagggttttggctaggcctaactcggttgcagagttttggagtgttgttgatgaaatgaagactgcagggtatgatatggatcttgacacttatataaaggtttcaaggcagtttcagaaatctagaatgatggctgagacagttaagctttatgaatatatgatggatggtccgttcaaaccatctattcaagattgtagtcttttgttgaggtatttatcgggtagtcccaatccagatttggatttggtgtttcgggtttcgaggaaatatgaatcaacagggaagtctctctcaaaagctgtttatgatggaatccacaggtctttaaccagtgtaggtaggtttgacgaagctgaggaaatcaccaaggctatgagaaatgcgggttatgagccggataacatcacatacagccaactcgtgtttggtctttgtaaagctaagagattagaagaagcacgaggagtccttgatcaaatggaagcacaaggatgctttcccgacataaaaacttggactatactgatccaagggcactgcaaaaacaatgaattggataaggccttggcgtgttttgcgaatatgctagagaaagggtttgatattgactctaatctgcttgatgtcttgatagatgggtttgttatccacaacaaattcgagggggcaagcatattccttatggagatggtgaaaaatgccaatgtaaagccttggcaaagcacgtacaaacttcttatagacaagctgctaaagatcaagaagagtgaagaagcactagatcttcttcagatgatgaagaagcaaaattaccctgcgtatgcagaagcttttgatggataccttgcaaagtttgggactttggaagacgctaagaagttcttggatgtgcttagctcaaaggattctccttcctttgcagcctactttcatgtcattgaagctttctatcgagaaggaagactcactgatgcgaaaaatcttctcttcatatgtccccatcactttaaaactcaccctaaaatctccgaactctttggtgctgcagcttgaggtattatgtcacccaattgttccgcagagacatgttcatcccattcagctacaagaatacaaccaagaggtcatctactgtttggaagtctttccattcaacctctctggaataaaactctactctctttgcgaataatgtccattcctctgttctacgtgctgcagggtagtaagatgattttgtaggctttgttgatggaactgaaagatgttgtaggattgttcataaacagtttgcatttatttattcattttgcaattgttgagcttctctgtctctttcttgttttcttcaactcagtattgaatggatatcattattttcatcagagaatgcaattatggattgaggtcttgatcatgtcctggtagaatctttctctttgctttcatctttattgaggatcattgttggaagtattagacgacatgaaaagtcagaaaactcttatccgaatattaacctccagacctgtctgctttggccatgtgaggtttgttccagaagtctgttaagcttacgtgttccttcttcacacatgcggctgtctctgattgaagtagctgaatgaagagagagctcacaaagagacatcatactataaaatgtcacttcaatcaatgtatttaattatcagccaagtgttttggtctctagacttttttttcttgttgcttttgatacatcaacttctctttgtttcttataccatacgttgcaaagacaagtcatgaaaattgtacaacggtttttgaaacaattaaggtcttagtttctacctaaaaaaacattaaggtcttaataatgttcgttagtgttttatcattatatggacggatcaggtttacactttgaaaatagggttttgatttgaaccaatcttcatcaaaccgagccggatcgaaactggttaagccctatgacagcattttaccgtaaactaacaaaacagagatggatattctggatgaaaaagcaattcaggattaagaaaaagatgcaaaggaataaacttttgacatggaaactgtctattgatgcttaggtttttcggtcacgtatctaatcttgtgtgttatagtgatagtgatgctgacatttaaccattcaccaaagttagagaagtgtccacttgccctacattttctatttttccaaatttttacttgtaaaggttagaagatcgattggctcagtgacacagtgacatgattaagacatttgcttcaattagatccaacgatgtcgagtaaatcaaatttgttgagaaatggtcaaatcaaattttaacatattgttaacaaaataaaattttgattaattcttcttcagaaaacagtctccctcagtgtttatgcattcatattgttaagatcttaattgcgttcttacgatctttggtcacttgacaatctatcaaaaaaaaaaaaatttatttttttttgtctatgagtgtgggatttaataattaatagtttttgggatctatatataattccctgtttttttttgttctttttcttgggaaaataaaaacttagttggatatatgtcatcctgactagacccataaaataagacaaaataaaataaaataatgtacaatataaatctatataatatacaaacaaaaacaaaatgaaagtttagcaaaatacaaaaacaatgaatggagagcaaaacctctgctgaggaaacaaaataagaaactctaacagaggtacacgtgtgaggatacacatccactgatccccacaatacacacgtgtactcgcatctgactacgacacgtttcacgtctggaacagtcgcaacataccacgtattgaataaaactgacgtcgtacgttgcccacatatcttaacggcaaagttaacggttaataaccgccgggaaaatattccgtcaacttctccgtttgttcaccgaccacaaaatttcactaattttcataattccttctcttcacatacaacaacacatcataaaaccctagatttcattttttcacatttattttttctaagccatttttatttctccgtctgacgttattgccagataagcttggagtctctgtttggaacacggcagttacagcaacgagagtattctccagttctcatacggaatctactgagaagattctccgtcggcggagccacacaataccgaggcggagatggagaagccacgacggagaacggcgatttcggcgatagatctccaccgccgccgctagatcgtggtgacatctgcttaggaggcgacaaaatcgcacggatcttgcctccgtaaacacgatcatattcttcaacgatattcaccagatcttcgtccgatttgacggagattagtgtctcgagatctccatttggtaattgacacttcaattcaacggagtatccacaaaattcctccaacttcatcgtcaattctgaaggagaagtagaaaaatcaatttcgatgaattggaaaagttagatgaaattggaatggggggaaaaagattgaaacggacctgtgaaagagatagagtgatgaacggagagtactctggtgaaaccgccgacgtaacggagctttccatcgatagaacgagggaggattcttccgccgtaactgcagaggaacttgagactgttcttcgttttctgattctcagctacggccaccattgttagaagctt

SEQ ID NO: 496 - DNA, 89469 bp, Arabidopsis thaliana
gaattcattgctttaggaaaaatttcctcacaaaaaaaaaaacagaaaaaataacaagaaaacacaaagaagaaagaaagaacaaacactaacagaatcttcagtcttgtctttccttaaatccaccaactttccattttttatttttatggaaagacacaaaaaataatcatggcttgtagttgtacaaccaaaccttgaacttcttaaagaaaggaaatctcatcttcaccagtttcttcttcttcttcttctccttaggtttcttcaccttgcaaaaatgctcttgaagaagaggagagttctctgattcctccatctcaccttcataagcttccccatccggtagtgttgtgccaatgctactgtctgagctcattcttcttagcaagtttgtcagcataaccgaaatctctttaaattccggacgcgcatccgggtcttgtgcccaacatgattcaacgattgggacaaacacgtcgggagtcttcgtaagtattggtctccgaccctgtaataaaaagatatccaacattttaaaaccttattccttttaagttaaaaaggatgatgtgtttttatcaaaaaaaagttgatgtttgactttacttggctaacaagatagggaacaaagaggctattaggcacgtcagggaatggttcttcgttcgtaaccagctgccataatactatggcaaagctgtaaatatcagccttatggtcatattccttcttctccccaactctcagcggctcagggctatacacctgtggttacggaacagaaaatatttagtttatatgtttcgaaatagaaaactaagctcaaaatgatcactacctcaggagccatccatttagaggtgccagcctcacaggtcatgccacctctagtttcttctcttgcaattccaaagtcagccaatttcacatgtttcagatcaccggttaccaacaaattccctacacaaaacacaccaaattatcaaattttgtttctctgtttacaagaaatactgagtaaaaattggcgcatgtttattgtttacttggatttaaatcacggtgaatgatgccatttgagtgcacaaactccatggctcgtgaaatatccaaagcaaagcttagtgacatctttaggtcaagaggacccggacgagagtgcatgaacctctgtagagtgccgccttcaacgagttcggtaactataatcaattgtggttctatgcaagctccaacaaactatatatacatcatcaataatcatgtttatttattttactttacttttcaaaaaaaaaaaacatgtttaatatgtcattattataacattaatattgaaaccaccaatataaatatatatttctcaattttcaccttcacaatgttgtcatgtttcatcttggatagtaacagaacttccttttgaaacgtttttttgtgcgctttggttacagcggaagttgtactcggatccatgatcttcaccgccacgggaaattggtttcttagcctataaatcatgatagagaacatatgaaaacttagtgatgattaaactgattaaacgcatttgaattcatcaatataatatagcgagagatgaaacacacaatcctttgtagacgatggagtaagctccttctccaatcatctctcccactacgacatcgtttcggtcgagaagcaattctctgctgatactgaaatggaatggctcgtcgtcggactcattgtgagaaggatagtttctgaaaatcattcgagatatcattttgaagaatggaagtgagtgaggactaaggatgatgagtgaaagaggaagagttgtacctatttatagtactacaaatgtgggtggtaattctgtaattctgtatgtagtctaaaactggatggttatgtgggagaggaaaaactgaattttgtttcatgtatattaattgacaattaatggtaaaagaagggaaagtattgtttacccaattagcatgaattgcatgacatggttttgttactaaccttatctctttaagtaacttttttttttataatttattcaccaccatatgtcatgattttcttgtaatcttatctttaagtaaattttttcataaatatgtttaacacctttctttttaatttttcatataaccgttactctatactgactatacatatacattgtggacccgatatgtaaatatgcaactcttttagaagaaaaaaaactttatgcatgacgtgcacaaatgtataccacgagaaaaaatggtaaaattggaaaaactacattatttttcaatttctatttttttattttataaaatatatatatatatatattaatgtatttatttgtatcgccaataattttaatgataaaatagaaggtgacacagttagaatgaaggcgataaatatttatttttttaaagtgttctatgatcataagtattaaaaataatagattcactaatagtttttgttttctttagttagctaagaaattatgtgccgatacatcttgtaagtctagcccctacctaatactttataatgtatgtagtgaattttcttctatttttattattaaagattggataaaataatcattcaagcatcatagtccatagtaatcttgctttgtttcgcaaccaagtaagacatctcaattgcgatatcatggcgaaatgttttcaaactttcacgtctatgttgtatcacatatccaatttatgccatagacttggtggagtgcatatctaaatcccacaatgtacgtctaggatatagaagagctcatgcagtcatgctaatacaagttggatatgtgtattgtgtatatatgaaagaattgtgattttagggaagagacacaaccctgcgtattgaagaagagaggacttcaaaattataaagatgagtactaaaattttctaccttaagaaataagaactcaaacgaaaaatacatttagacttctttcctcctaattttaaatactattcgatcgttgtaacggaaacaagacttaatagttaataacttaatatgggttagtttgggtcaagatttagaaacccatcagtattgtatattactttcacccacaaaaactagtttttcaaagcattagttgttcagtaaaaaggagactagtgttttacaatatacaaaagctgtgaaaatatgttttacaatttaaggctggtcctgttccttatttcctttgttacgttttaaattcttataatttttacgaagattgtaacgagttttttttttttttttttttgtaatgtttcaacagaaaaacgacggtttacaacagttagagtttgacccccccaaaaaaaggacggtttacacatatatagaaatactctgaaaaaatgagaagaactggaataacaaatagtggaaaaagaattgaaaaaaaaaatgattgaattaaaaagttatagtcgaagatcactttagctgcgtgttccaaaccaagtcaataagagagaatcatatatacaatttgaatttcctaaggagattagtaatgattagctaattaaaaaaatcttcatatataactaatgcaatttttttggtgagaatataactaatgcgattatcatcatcataatgattttgtatatcatcagattcctatactcatgaatcatgattttaattcaccgtttcatattgacgtcaagtattaaatattaatcatatacaaccatatttgttaccgttaaataaccgaagacttagcaattaaaaaaggagctacttattatacaaattaaacactaattatttattttacattgtaaaatacattactgatagggactagcattgaccaaaacaaaaccacgtgataccatgtggcaaccaagactcggaaactatataatacaagatacccaaaagggtaaaacgacacgcagtttataagtaacatactataaacggtaagcgttcctaggcaccacgtgccatgcacctgacacgctccaaaagatgctcgctctcgtcggcgattcttgacaacgattcatgcgccactccaccgtcgcaactcagcgattcggcagcggtctctttcagcttctttatcttctttctcatctcagcaccttcctcctccaccatgatctttctcaccaacgcctcgatctccgccctcgtaatcactccctccgacggtagtttcttagagcggacggcaacgccaagctcttcgttgaggagtgtcgcgttcatcatctgctccgcaaaaagtggccacgcgatcatcggaacgccaccaacgacgctctcgagaatcgaattccaaccgcagtgagttagaaacccacctacggcttggtgggccaagatctccgcttggggagcccaagaagagaccataaagcctctctcatgagtccggctaacaaaaccttccgggagataatcaggtgtaccgtctcgtattttaccactgttagcggataaatatgcactgcaagctgaaccgtccaccgggggtcgaaccacccaaacgaaccgttgctgactcatctcaagtccccaagccaattcggttagttgtttagccgagagagagccaccgcttccaaatgaaatgtaaagtaccgactcgtccggctgtttgtttaaccaatccaaaaccggatgattagttttagatggatcaaccggtctagacaaaggaccaattggataaaccggtacaccagcaattcgacccaagagctttgggtcttgaagagatttcaaagttttgggctccatatcatcccatgtattcacaataataccatcacacgttgggaaaaccgaaccgaaaggaacaaattcccggtagagttggctgtttgggtcaaggaatgtttcaagtgtatcttcaaaccgaaccggttcacatccaggcataaccataggttgcttcttgattatgtgctcttcttccatgtctttgtccaacgttgggaaaaacaaagccaccgcgagaaaacgtgcgtttgaagcgatgaagatataagtcaacatgttgaactcaccaccgagcggtatcgcgtccaaaccaaacaagtctacgatcagagccgttggtttgtgttgcatctcctctatctttgaccggatggtaggaatggtctcacgcatcatgaccaagagcttgatcccaaaaaaggctgatgggtcgactaaaccggagatatcgggcgttgggaggccaacgatatcaacaagggccgcgtcgcagcctggtgagttaaggaattgagattgagctgaggctgcgtcggtttcaaggacgaaaatggtgacatcgaagccgtgggaaccagctaagcgttttccgagctcgatcaccgggatgatgtggcccattccggggctagcgaacatggccacatgtggttttgtaatcttcatagcctagatcactgaacgttggccttttttttttttttttttgttgttgttgttgttgttattgtgtcggtttactctctcatagttgcaagtgagttgaatatatagaaccaaaagactttataactcatttgtaagtatctttaaagtcttatctatatatcactttcattttttttgttttatttttgatatcatataccagctttaatcgttttacaagaaaagtaaatataaacatggaagtgtaaatgtatctaagttaattgcatccatatcgtgtatttatttatatagaaaagaattgaccacataagttgtcgcgtgaatgataaaaatgttgaatgcgtcgaccagaagataataatggtaagcttccgacttgtatatgtatatatgtgaattactagctcataggccataatgcatcatatatagtatgtcatgtcatgtatacataaagattcttagatgagtttcttgtacttattaaactgacaaacacatcgctaaacaaattcgaaacaggccatcatcgatacgagttatgagataaaaatgttagataaatactgaagtactgtacaagaagctaaatctttgtattattatctttttaaaaaaaaaatatgcacttgatgtaaaaacgttggtttttggggttgaataaattgtatattcagttcagaaaaagaaaaaaaaaaagagaaagagagttttctacatgcttgatcacattctcaaataaacgtctctttatgaatttcataaatgatgtaatagttatatctttattaagtatagaattcaaaaaaaaaaggttgagttttataaatttcgtgaattatgtcagcaaaatgtattactatatacttagatgcttgaaccatgccactgctgtaacgttgaaatttgctaaaatgatgttgcaatttgctcaaacatttaatgttatttgacttatcgcagtctaggtcctcgtcatcttgatattttccctcattttaaaataataagtcatctctagttttgaattagttttcgggataaatagtattttctctattttttaatatttatgtttttttagagaaaacatacatactaaaaaaatatatatcaaaaactgattattaatatattattttttgtaatttatattttttattaattctaaaccaataatattaaattatttattttgaaggttgatattcatcattaataaccaattaatattgcatacaaaatttaaaaaattaattttcttaaaacaatttttttctaaataataaaataataagaaatagagagagtatatatctcattcatgttttcatttttgaaaaacgtgattgcgattcattcagcttttacggtttagtgttttgaaaacgtaataactagacaaaacaaattaaaactaactttacaacgttttataatttattctacaaaatctatatctaattcagtttgttcctctaacaattattcaattatttcctaccaaaaaatcttcattctagatatatttctattaaagaacaaaacactgagtttaccccaattgaatctttacatctaagattgctagtttgctacacagcataatttgattaaactcgaatgaaaaaaatatctcctatttattctttgaagtgtacaattagttaaaaacttaaaatagttgacatatcgcaaccacattaatgctcaagttcttttttttcttttttcttaacatgcatgacatcgttttgtaagatgctatgagatttgagtttagaaacaataaaattacataaaaatatgtcgtagaaaattgtattgcagaatattattagctagtgtatattgtttcttaatgcaaatctcatatcatccttacaaaaagatgagactatgcccatccgagtacaacatgcttgcgaaattaaagaagttatcaccactttccctgacaccattgactaactttttaacatttttctcaatatgttccgatttcaaattcatgtaaaagatctatacatttttttttcaaaactaaaaatacatttcagcatacgacggaaacatgcaacctagtgatttatactgtaaaacggttgtcatgtatcataacttgagttcaaactcgacgacagtgttgtcaacaatttaaaagctacattttagtatgacatgccttgttcacatgttttgtaagcggaattattcaactaaatttatatgatggacaattagcctctcttaatacatatacataaattttatataacacatcaataaatcatagttttagtttgaacagattaatggacttcctttttccaaaaaaaacagattaatggacttccgatacgctcatttttatgaactaataaaagtacttctacattacatagactgataaacctgaactcatgtcatgtttatggggcaatgcatcttagagatcagacaaatattatcttagcatcaagcgtccccagcctcataataaaaatggtttctatcaacacttagttgacttgtatagttggagaattattcaacatttgattttttcaaacaaaatcaatcagcaatggaatacgtgagcagtgccgtattgagacagaaatatcagcttctcgtcatgggccagttgaatattggcctactaaatgccggattacataacgacaccgtgtcggatgctaatagcagccgaaaattttacgattttttttctttttttgcctgatgaaattaacggtatttctctggagttacgtaatatattttctataacctcaagtagtggttatatataaaagtcataatcaaaaaaaaaaaaaagtcattatcaaacattacatggtccaaaaagcattccatattgatagagcatttatgaaatagtttcggccccatatgaagattttgataatttcttttgacataacaatttggatcaatactttcattaactggactaactcaagctgctaaatgcgtcattgtcttattgattatctagtgcaattttgacgaatagtttcggcccattatagtctactaaatgacatgtttgagcccactgagatggcgaaaaaaactaacatactcctttttttttcttttgtaaactatgtatttattattttatatgcaagaaatgtggatatccaaaaccaaatggtatgtggaaccaaatttgataataaaaaagagggtatatgcactagatgaccatgaaattcataatattatagaaactaaccatggacgtatagtacctgtcggaaaccaactttaaattactctcatatccttataatagggttttggttgaggggacaaataactttataggcaaatagctttactactaaagctttcataacctcctcttcccttacaacaataaccaccactagatctgtaacaccaccgcctcctccgtatttagtattactagatctgtaaacactaccgcctccgtattcaccaccatcatatccataacaccaccgcctcttccgtattcatcaccatcgccgtttacttttgttgacatgtatttttattttaaaacattgtatttttcaaaatttcttttaaataatacttgttctttactaaaattacaatgatctgtgtgtctcaattcaaacgatagcatgtaatttttgaataattcatgctatttttctatttgatatgtatattttcctaaaacgtttgtattttttgataagataatattttttaaagataatgtgcattttactaataatccatgttttctactaaaatcacaagtaagttactgattcatgattcatgtttttttttataatcacatgcaaatttgtacaatcacatgtaatttataaataacacatatgtggtttgcttatctctgttgaaaccatttaccatattgtcaaaacaataaacctacgttctaatgtaataaaaataaatagcatgtccttaaatatcttatgcaacacttctatactcaatcacaactgtttctaaatggctatcttttaactaagtttttttttacgtatacatttttaaggtataagagatattgcatgtgattttaataaatagtggtctaatattgcatgattttttaagaagtagcggtgtaatcattacttcatattgtcttttgttccctacatgtagcagctattgtcggaaagaaagagtttctctcatctgtaaaggttaaaatagttattttgcaggctcaaaaaagttatttacccaacttttctgtacaaaaactattttcttaataatgctgtcaaatttggtcatcctctaatattaccctaaaaaaaataacatgaaaatgacccgaaaaataaatagtgtgagttgtcgccgaagacaaaaaacacattcgtttcaattcgtattagagtgtatatagttggtttagttatggtttagattggttagtatctttggtttagtttactatgtatttaagtttaatcatgtatcacattacgtttaatgaagatttcacgattattgaaaattcgtacaaatataaaacacaattgttgacaaatatatataaaccaagtgaactaaaaccagtcaaccaaaacgtaacaaaccaaaactaaaaattaaatcttcgtaaacctatgaaaaagctaaaataaaatcagtatttatgactgaaaaataaataaaatgtgaaaattagatttaagcccgaatcaacaactaaaaaggacgatgcatcatacacaaacaatctacgaaaaaacaaaaaggttaatgatactgccttttacaaatatatcagtctcattcaaacttttataaatttccttttaaacgtgtataaggacagaagtctcaaaccacatgaaccaaccaacttgtcatgtttatagcaaaacagaattgtccaacaataagatcaagtcacgcaacgatagattcatatagtttttttgtgtgtttctcattcaatttctcaaaagataatatcaaaattacaggtccactaaaaatggtgtgtttatatagataggcacattgaaaaatcatgcgtggttagagatcacattcacatgaccccatcatcacatggggagtggttactctcactttcacacacttgcatttttcattatccaccattacatataaaaaaaaaaatactagattttgtgaaatgaagcattgataaatgataatgactgtacaaaatagtcatgaagacaaagaccaatctattagctacgatttaaccggaaccaatctcgtaccggacccgactaaatagttaaaccacgatattaacctagccgcgtcctttggtgttgtgacctagcgtcagctccaagtcatcgataccaacatcgtgaatcttctcaccttcccacggcttcaccgacacatctactccgacggagctaacgctttttccgaccaggttaaatgtcggcgacggaggacatgtctgagaaacgttaaccgattggaaatttccccatcgacaagaatcaaccgtcgaaacatccgattcatcgcattctggaatcgatgtgtagtgatggagacgccgtgttgggcttgacggagctgagactgggaaattactgctttgccatctcggaagtctcggatttgatcttctaggtgaagaaatcggcggtgtaacaggggcactattggaaattcgtagaggagcgaggtttccagacgaagctaggttttggagatagggaatgagataagtcgaggattgattcgggtcaaaccgggtcggacttgggtaagatgacgatgaagggctagcttgatacgaaggaattgggctttgaaaggccgatgattgtggactaagttggattgacgaacacggcactgttgtttctgttggtcgagaaccctgacggaaaaaaaagtcaattcaatgtctgaaaattgtttaaaaagaatcaaaatttggatgaatctgaagttaaagttgaaacctttcgataagtggtgccatcttcatgaacgatccaaccagcttcaagacaaagagctttgaggacttcattgttgtcacagtgtttaggaagtttataattgccttgagatctaagtccggtgaagattttagctgctattgctcttcttcttctttctctcttcttgttgttctctctttccttccacgtcggcatcctccccgtcgccgccgttgatcctcctcctgatgccgtcatcttctatctcccactttctctgtttttgttttttacttttcaatgtctgggtttttgttgtgtttgcgtaattctcgaggagagaaaaaatgactaaagaattttccttcacgaggagaaaagagaggcaaaagttaaataattttaatagagaaagtttcgtatttatatgatttgttacgtatattatggactaaccatattagtcaaaataaattttgatgtgattgtatgtttgtaactaatttggcataataaggaaaacaaaaggtgaaaaggaggtgagaatctatgacctcacgtactgattttgaagttgggaagttttattattaaaaaaaaaaaaaactactttgttcatctgacaatgttcggtggaaaagggataataatgtctttgagtttggtttcttcgccgtaagatcacaatctgtgtggtttaatccaacggacaaaacatgtcgaagaagaaaatggttgatgaatgattggttaaaaaaaaaaagatgccatttgggtttctctggtaattgtggttcataaaatgtgacgatgaggttaaaagtttgaacggctcagattcaatggtccacactacacagcaccttctgctccagtcaggtcaacatgggaatcatgtatatgttacgtaccagagatttgtgtgccctggtgtgtgtgccacacacgtgcgacacagaaacctcgagccggaccggagctatgggacccattaagccttcgagccctacaatgcacgtgactgtggggatcaaaaattttagtatctttttgtatttgtcatgaattctgtctactacgatagtatttctgtaactccctccggttcgaaaactgtgatccttattcttaattctcggtttagaattagttcattgttcataatcatttatctgaaataattcgatgagacatgtggcaatttgtattcagataagaaaataatgtgataataatgttagagttagttgaccaaaaaaaaataaaaaaaaatgttagagttagatccagagtttaaaatgggccgggatcttaggcccaatggacatttgatttgtataaaatttctctaaaacccctaatatccagataaatctctagcaagattcagatgtgtatgcaagcagtagaacacgcaacttatgaggagacctttcttgcgcaacactcgtctcgtatattaatatatagagatgtagaattgatataagtctcttttagcttatgttattcactactctcatgtaactataaatacatcttgtatgtttcttttatctcattctctcattcttttccaggaaaatcataacaaaaacatttctgggaaaatcatcatcaattttcaacaatttcttcgattcatcttcatatcttcatcttcatcatcatatcttctccaaaattcatcatccttattgtacgatgagagaatcaagccattgatgctccattttcttcatcatttctttcatccaccaaatcgaagaaattgttactttcgctatcatcttcatcttcgttttcttcaattcaatcatctattgatacttcggttcttcgattctttgattcatcattgattctatcatcattcatcgattctttcgttcaacatcatctttggttcaaaattacaacaatgtcgacagatcaatatgataattcgttctttcttcatagctcggatcatgctgggttggttcttgtatcagatcgtctcaacactggagctgaatttcattcttggcaactctctgatttcttggaagtcaaagaagcagaatgtggcaagtagtagtagtacagaagctgagtacagagccatggcagtggcatctgatgaaatggtttggttgaatcagcttcttcaagatctacatattacaatcacaactcaagccaagttgatgtgtgacaacaaatctgctatgcatattgcaaataatccagtctttcatgaaaggaccaagtacatagagatagattgtcacaagacgcatgatcgtataaagctaggttttcacaaggtttttcatgtttcaacagctaaccagcttgcggatatcctgaagaaacctctgcccccaggtccttttcattcattgcttggacgaatgtcagtgtcaactctcttcactccacaagaaggttttgattctaagagttgaggggggtgtattaataatatatagagatgtagaattgatataagtctcctttagcttatgttattcactactctcatgtaactataaatacatcttgtatgtttcttttataattaatgagaaattcactttcatcaagtgttaatatcgtatgcacaactatagtggtgacgatcggattcttggtgacaatcagattataatcaaagatgatcgtaataggatcaattccgtggccattctttaaaaatcgaggaccttaccctgaaaatagaaaaaaaaattcatgagtttggttgtagaataagagtgtacaagattgttcactgcactgtgtcatggagaaccagcttttgatatggacccatatttgaaagtaacacgatggatcaaatgcaaagtattttagttgataacaacagacaagtataaaaaaaaataatacattgtaatataattattgctcatacgggccaccaaaatggaacccagcccacccaatacaatctgtataatctattcgagttatcaactaaaatattaagacgaagagccttttagtttatacgttatgccattgtaatgttggttttaaccggtttttgggccacaaaaacgggaagaaaatttgcttcaagttcaaaatagacaatgtagtctgaaaaaggatgtgataaagacataaagtaaatgtctcattgtgcacaagcgtggtaaagggtcagtcctaggctatgatgtaaactcgcacataacttaggacgtctggtttttccattctcgccttacaaaatagcgcttggatggagagttagggcagggtttcttcaggacttgaccaggtttccgtttgggttatttacctggtttgctattgttcagctatgtagaagtcctccgggattagccaaacactcgttgatcaggatacctagtgctaactctacaaaaaacttcacattatatataattagtgtcgagtgtcgacaattggaagtatcttatccaaatacagtatatatggttaattaatctaaccatctttgataaattaatatccaatttttttaaatagcacaattcaaatgaaaccccacgttaaacgcacatgcatggcacatcgtcatttgggatcattaattaatgacggttttgaattagaacaaaggtcgtaattaaccgaaaacacggctcgttttgttagttgcaaatcaactagagtagtccacacatcattttcaaacgagtctgttactttcccatcgacgtctacacattaaggaaaaaaacataaatacaaatccaacggaacgcttttgatgcaaagcataaaattaattaaaaaaaatatggtagattaaatcgtaatgagtagagaccataatcatatgttttcttgtagaagcatctttcaacaagttttaactgattattacatttgtcatttcagtatatcttttcaattgaaactgcatcatatcaaattatcaatcaccatatttacaaaacaaagtcaatttctttgttagattaccatttttctcctagttttggtaaaactctcctaatggggtggtaggtcaggtgccactcagagtaatacaatgatacgtggcaaagcctaagcatgtgttctcaactcccgccaattaattacgggtcgaacggaccggaaaatcagttcatcgctttaacctcagaattttcagacaaaaacaaataaatagctttacttttgtaactaccacgttcatttacctctcggagacacgttaaattataaagaacaaaaaatgagaagagaaaattacgtaggtaatagcatcccaaaaaacgttttataaggttttaaaaggtaacaatttgaataattcacgggagagaaaagggtgataaagtgtttaatacaataagactgagtactcctcttaatttattaagctttaacacgtaaggcatcccatattaaatgtgatagtgctaatacgaccactcaaaatgtgtcacgtacaaacattgacaacaactttattaaccagggaacacacccatatgtacctatgtagagatcttaattattctcaaatgtatatgttatctgaggagacaaataaatattttctctaaacataccatattatattaaaactcaagagcaattacatagtttctccaaaatccaccattggttgcaaccgaagtggtgcatgaagatataaattttgcaattgcatccacacgtttatttccatatctttaattttataaacatatgtttagagaggttttgcaaaatatacatcgcagcatatacagaatcatacctaataaaatatctaataataatatatacatatggcttattcattcaggcgtggaagagagtgttaaagaggagttaatactgtttaagaatgatggtaaataaagactgaatcggtccaaaacatttgatagattttgcgagttacccaaacttaaaccttaactcatataaatacatatctttttcctttacgggggacaacacgccaaaactgaaatctcgaggaaacaaatcaacatttaataatgttttttttttctttcttcatggctaaaagataaaataatttccttacataaacgaataatatctcgccgacaaatttcattcaataacattgactttctcgtcacctcctttctattcaaactcactgaaaaaaatttcctaaagagtaaagaaacttctctcctgtcttttctccttctctatctctctccctcaaagctaataaatacaacatttgcatctaacgtttctctagcacaaaaatatgcactcgaagtttatattatatctcagcatcctcgccgtattcaccgtctctttcgccggcggcgagagattcaaagaagctccaaagttcttcaactccccggagtgtctaaccatcgaaaacgatgaagatttcgtttgttcagacaaagccatccacgtggcaatgaccttagacacagcttacctccgtggctcaatggccgtgattctctccgtcctccaacactcttcttgtcctcaaaacattgttttccacttcgtcacttcaaaacaaagccaccgactccaaaactacgtcgttgcttcttttccctacttgaaattccgaatttacccttacgacgtagccgccatctccggcctcatctcaacctccatccgctccgcgctagactctccgctaaactacgcaagaaactacctcgccgacattcttcccacgtgcctctcacgtgtcgtatacctagactcagatctcatactcgtcgatgacatctccaagctcttctccactcacatccctaccgacgtcgttttagccgcgcctgagtactgcaacgcaaacttcacgacttactttactccgacgttttggtcaaacccttctctctccatcacactatccctcaaccgccgtgctacaccgtgttacttcaacaccggagtgatggtcatcgagttaaagaaatggcgagaaggagattacacgaggaagatcatagagtggatggagttacaaaaacggataagaatctacgagttaggctctttaccaccgtttttacttgtcttcgccggaaacatagctccggtagatcaccggtggaaccaacacggtttaggaggagataattttagaggactgtgtcgagatttgcatccaggtccagtgagtttgttgcattggagtgggaaagggaagccatgggtaaggttagatgatggtcgaccttgcccgcttgatgcactttgggttccatatgatttgttagagtcacggttcgaccttatcgagagttaaattttagatgttagttttcttttttggggggtaaaagtatatttttgactgaatgtgtaatataggaagatgaataataatacttgaataaaatgataggaaggataggatagtcgaatgtgtaattagtttggtgatggtagttacttactctcgtaacgcattgcctacttctaaaataattaattcgatacctataaggtaataattgtgaatatgtatatctactctaccgaatgtactacggcgagtaattacaaagaaatatactacagctttttttattgatgaatttccaaatatatatgttttgttttttttgcttttacagttgaatttaaacacatcatcttccattgattatagtatgaaagtttaatattgaatttgagatttgagattttagcagaatatagtcatccacttggttttttccaattataaatctttgttttcctccatgcatacttctgtagtttaagttacaaaagaataccatcagaaaatcgtccactagttaaattatttacaaaaatacacactgattcgtaggcttctaaacattatatgaaaaagtaagtttgcttagtctaaattccttagacttgccaccgtgtttgtgtcttatacattcggctaaacaacttaacagatgtaattgtaaagaaattaaattagaaacatcattagctttgttaaccaaaaaaaaaaaaatcagaatatgatggtgtgttaacgttaattttttactaatcttttagatgaagcatttcaatgtagcatcattgaaggttttctagtgaacaagattgacaatgttaatgattttattatgttttataatgtgatcttttgtatatttttctatatatcttaaaattttgcgtagatttatataaatagtcaaataatttgtgattgtatgggctttttttttctcttcaaaatattagtcaaagttgtaaagaatttatcttcgataatgtaacatctaaaagtttttttttttttttttgtcgtgtgaattgagactttgatagttaatttaataatactttctatattaaaactatatacaagtcatgcagaataaatatgatttggcagatagtgattctaatgacgatattgtcatatggtagttgcagttttttttgttcgattccataattttgagctgtatcctgtctagtcaataataccataatagttgctttgatcattgtacttaatattcatatagtacaaatagtatccagtaatttggttgttttttccttgcgtaaatgaaataaactcgccggccaagaattacgaggttgtcttgtagttaattactacacatcaaaagtcaacaagtcagcgcgttgtcgactacttgattaaacaaggaagcaactacaagtcttagtctatatatgattcttctatttctgtcactcaataatgttcaaaacttcaaatggatcttaggtttgatatgtctaatttggtaaacagaactcacgtagacttattgatcgctgagaatagaactcacgtagacttatatacaatttgttttatatattttgatatttagacttacacattatcttacgatttctactggatttatggacatgtcatatatatagatacgtgaaggtatatatgtaaatctataaatctatgtcatatatacgtgcgattataagattaaatcacataattgaatgattgataagcacatgctataactacattatacatggctatgtatttttcacgaatatagaaaatgatgcgtgtgggtcaactcaatagagattacgtctggatctcgacggattaatatgcaatagtgtagtataccaatgaacatgcatgttatttagatcctttcgttaggtcaactcaaggattatatataacatgttaacatgatctatatagatatagtattagtctatttgatatcgaaaagtgctattttaatactcaacgtacaccgaaaaatgctttaactattctatttaaattttaaagaccaaacatttagttaacaaataccaaataaattaaaaccccaagttatctggttaaaaatgacactaaagctgaaaaaatcccaaatatataagcgttaatcccttaacttctactcggtgcattctctctaaatttttcctttgattcatcgaactcagttgcgattaaagagatattgatggctttgaaaaagaagtgtgagggattgagtcaagtaggtttaggggtttgagttcttaaaggaggtaacttaagagtagttttaccaaatttgtcgtgcaagaagaatatttttgacacttcgtggaagttgggaatggaaatagcattaacttatgatgtctcctttcccatctttattcaaagagacctaaacacatttggtatcgtctttcttaagggtgtcccattaccaacgagactaaaatctccgtttccaccacgttcccacttttctctcagttttttatttctcctctttgttttcctctccaaatgcatatatgaaacaaatcacatatatgaacgttaaaattcatgcatagacttgttgatgactatatatttatcgtagatttcaaattaacagacaattaataaagtatcttctataagatttttcattaaaaagatctgatcactactaaaacgttgaaaagtcaaatatgcatattacatatgagtgacatattaggccggtgaacaatatgccaaagatcagcctaaccaactctcatggcctaatcgggtcacaaacaaaatttgacagacgaagattattacgtttttttgttttagtcaaaatcggacagacgttttttttgttccctagttttcgtgtacgacatcaagactttaacgcgcaaggaaacgcacgttttctgagtgcaagcttcggcatacgagagaggccatacattgacatgaatatacaaagcccacaacttatccatcccatcattaaagaaattttattttattttagtggtttaggtttttcaccttagacattccaaaattgatgataacttaaaattttcaaataagttaactgaactttgtgataccttgtaaagtgaaataacaaatctaaaagttttcgttttttttgtcaatgtgataacgatgttaaagcaaactactacactaacgcattcatattaaaatgtatgtaaaactccaactaatttgtcacaaatttacaagatatcgaggcttgataaggggtgaagcttgagaaaaacgaggcttgtaacagctttacataggcccgcttatggctccgtaatattgggcctaatgaacattttgggcttgtatttaggttaatttggatttcaatatacgtagtttgtatttgtttttggtgagtacattatattttgtatttgatataaaatataattagggtagtccaatgcgtttttcttaacaagtctaaacacatttgtttttttgtttttcctggcttacaagttaggtatactctcttttcattacctataataacaaagacatcatataaagcaaatggttaaatttgtttgtggtgtaacttatgagggggaaaaaaccaatagtgattaggaagacagcttgtttcgtgtggctctgcgaggatgatctagttgtatattaagatatcagaagttataaacaaaacaaagataatgaaagacatgaatgcatcaaattaacggtatatatagtgttggaatcaaattagtggtgaattatcgggtttgcatcaaactaatttggttattcttgagattaggaatgtgtgttcacctaaaagctagtaattgattactaaaatgtaatgcatgcaacaagaagagtcaatcgaattttatagagataagtcatataaaatgattaattatcgctagaggaagctgcgatgaaatttcttacagcttttgtcttttacccatctaatcatttaatctctgagcctacgccatcacacatatctaaaagcaccttcttcgaaattcccttggaggacaaaacatggacctcttttttgttcacttggattttctcggaaaatgacttgcatgtcttcttactatattttatgtatcccttcattctatactttttcgaaattctaatttaactctacatataatcccactcccaccagctaaagtttagacatgacaagtattttatcaaatgctccttcaattcaaactactgaatattgtttggataagtactttttggagacgtaagctatattttccaatccgaaatgaatgaaccaaatgtccatagttctgtttttttttcctcctaaagtgaatatattaagagacactaaattctagaaaatatgtttaaaatataataatcagtaattgtccaaaaaaatgtgaatacttaaatcaaaatcaggatacgattgtcacaagaaacaaactttcctagataatgtatattttatattattatcatattatgtatgcacttaagacatctccatccatgagaaacctacaaagtttttcaaacaaaaaaaatattaatattatattataatttgattatttttattaaaaaagtatttttgttaaaaaattaaaccaatagtaagatgagaattgtcatgatgggttgtacaaagtatctcagagtatctcagagtttctcacttgagaaactttctacactctctctccttcatttttattatttttatttttttaattgtgagaaattcttatgagatacccacaatagagatggtcttataaatttatcaacatggtgaatctctcatgttatatatagaggtgatttaaaggctaaatagaataacacactacagcatataaactcaatgatatggcaactcaaaaagagaaaccttcctccaattctttcaaatggttttccaccaaaaccttaaagttaaaccttagtttccaaaaccgacgaagatcaccaaaatcaaactcttcgtcaaccttaaactctccaagaagcaacagtgatgacaacaacaacataaagagtcaccaggcctccaaagaagagctccgtcaagtcttcagccatttcgacagcgacggcgacggtaagatctcagcctttgagctcagacattacttcggctctgtcggtgagtatatatctcacgaggcagctcaagaggcgataaacgaagttgacactgacgcagacgggtctctagggtttgaggactttgttggattgatgacaagaagagatctttacggtgacggtgaagttgatggcgatggagagttgaagacagcgtttgagatgttcgaggtggaaaaaggatcaggctgcataacaccaaagggtttgcaaaagatgcttgtgaagttaggggaatcaagaacgtacggagagtgtgaagccatgataaagttttacgatatagatggtaatggaattcttgattttcatgagtttcgtcaaatgatgacggtttagtgtaattaaatatttcttttacgtaattaccctactatatgctcgaaaaatgtttatggagtagtgtgtgtgagtttgaatatagggattatgttagaagtgctattattgaattgtggtgaaattttagtagtgttggaatgaatttatgaatgaagaattcatatttaagcttgatttatgttaatgaccaaaaaaaataaagtgggaattattctatgtgtatttacagtattgtaggcatctatttatgagatatgcccactaataatttaatagaaatgatgcaaagacagaccattaattgaaagttggagtatttattctgtctttggctctgctgaacatttgccatttattcttcattcttcgtcgttattttttttgggtttgaaatgcattggtatattatacgagttatagtacaattctctccgatgctgtaatttgccttttaatgattaaaaaaagaatatatatatatataccaaaaaagttgggaaaactattgaattgggcttcagacgtatgttgggtcattaggcccatcatagatccctttttcaataagtttctatttaaccacttttatattaaacaaattcattcaaaaattcaggttaagaatttaatttttattaagggtttgagcttaagattttccagtttattagattttatgattaagtttgtatttcttaaggttaagaatttagaacctaattatagggtttaccttgtgagctgttttctgttaatcttggtagagaatttagactattgttgatagtagtaagtcactgaaacatttaaaatggtataaaaatcgaatcagaaatatacatccatcatcattatgaaaactgaaaaatacaaaacatgaagaaaaaaatcgaccactaaaaaacctgcaagacattgtctcgtacatggtacgatctaaaccaaaccaaaccaaacaaaaccaaaccggaaatcaagatcaccaaaccaacacattcccatagctacattatgcactgtacaatctaacaaagattactcagctttctttaagtcactcctcttttgaagttgaatctgtttgacacgaaccattagcttgacgatctgagtaaggtctaatgaaagatcgtctccaccaaacctcaaaagctctctgaagattcggacatccatctcctccgtttagaaaactcccgagccacgacagtaaaatgctctgctgatcttccaatggtagtgtcagtatcgtccgaccaattccttcctccactagtttaccatcaaacgatctgcaaccatgttgaagccagttatagtcattgaacaacggttgcaaccatgttgttagtagcagaagtcgagtgtcctttgaaggcaacaattctcctctcccaatccctataaagagccgagatgttacacggcttatatggtaacgagacattaaaggaagcttctcatgtaacaaagcgagctccttttggtttgcccatgtgactgagaattcctctgcagcttgtctttccgctaacacatcaaggagccacgtgaggttatctgcttctacagcaatctgtttggtatcagtctcaggtttctctccctcagaagcttgtttaaacagagacagaaccgaatccaagcaggtttggcaagaggaatagattgtatcattgaagttatcagctacattggctccattctgttctctaagaagcttcagaacaatagatttcatctcacgtcgacttttctcctctttgcttcttaaaacaagctcaatgatgcgtgatagcgtctcctttggtggatccacagcattagaagcaactcgtttgagaacaggcgtgacaccaactccttcagtttttaatctaagaatcgatgagataactttctcctcttcttcttccccaacccaaggcacagcttctaagtaatccaaacaagactgtatacatgaactaaaaccaagaagctctgcaacctgcaataacaactaaactccttagaagttcccctaaagctttaaagttaccaaattgagtcatttctatgaacatcatcaacaccagaatctaaaagagggttatagctgcaataccttgaggacacgaagaactctgctaacattttgtttcataagtcgttgcttcatatctttacaatacataagtccaatagtctcaacgtaaagctcagcatcttcacagctctcaatctcaagacaagcaaaaaccgaatctttctcagctagtttcttagcaaagaaacaactatgatcaaccaaaactttcttatgaacactaagcttcacacaaaaaccttgcttcccaaccaaaatcactttagcatcactacttcccggttcaccaaactcaatagcaactttcctcggtaaagtctcaaccttttgcctctgtggtctctcttgaaccgtcgcaggaacagcaatactatgaacagtatcaaaactacccaaattctgttgagtttcatcagaagcaatgacggatctaatagtagtcgaagatggtttcttctccggcttaggaggttgaagagcaggagaagattgcttgtgtttggtgagagagttgtgagatttaagagtcttttgaaacgcaacaggagaaggacaacaccagaaaccttcaggagttacagctactggaacattcctaatcttcgtttgcctttgttctactttagcattcttgatctccgccattgttgttaaaacacacacaaaagcttaaagctttcacctttcacacaccattaaagagacacaaacctaaacagagaggagaacaagtcaatttggggggaaaaacaagaaccctagaaaaaaaatcagaaatttgtagatgaatcaaaaacagctgtgtgtagaatgaatgattggagaggtaataatggtgtttaaagaatcaaagtttatagtaacaataatgtgattataagagatttttgaaaagaagagaaaagccaaaactataaagaacaaagaaagagatgcatcaaatggcctttgtctctctacgattcctttatcttctactttacctttgtctcctctcttctctctctctctctcttcgcatgattttgatgattacatgtaatttgtgggccttttttgttgaacaaaaatattcttctttaaaaagcattactttatttctcagtgaccagacagccacgccatgtccatttctctctctcatcctccaatgttttgaaaatttattattagtatatgattaaaagagaataaatcaggaattttgaaatgttaaagttgatgtgtgtttgtttatgttcatgtggggacagttcttctctttcttttgtgagttttgagattcttgagtaatgcttataaaacaaaccatcactttcttgtagatttgtgttacataaagcacatgatatgcatttaatttggattaaaatttggttaattaggagattaatattgggagatcattaattaatggaacatatatagcctatagctgtttttcttcttctacaaaaggctatataggttaaaatctcatttcttttaattgaagtatataaaatattccataattggtgttagtcgtacgaatttttattgttaatttattgagattgtgagctccataaatttagggggttggttgggtagttatagtattattttgtatagtttattatcatactatgatatagacttacctttctggttgaacaaaactacgcatatagagttggttataattaaattttagggacatacatcacatatatttctcaatgaatatatgagtacaactttaggttagcaaaacatttagagattgtcataaaaatggtacgttggaattctcattcatagttagagagacttgaagctaaactaaaacaaaatcaggaaaaaagaatactatcatacttgcaaaagaaaaataatactatatatattatacttctaaaaaggaaaagtcgtattttatctaatttatgttatacttcatatgctgaaacaaatggaaatatatgacaaagaagatttgatggcatttgctggaagctagacccacgaaaaaagcataaggactcttgatgatagttgataccatgtgttccacttctttttattttttcgttttattgcaacgaaattaataaataatttcccacatgaacataacaataatgaagtcgaagctaagctaaataaaccatgaaatgtttctatatagttttttcataatattcgtgttgtttttttcttctctagaaaacttccaagaactaacaatttcttgatcataaaagtgaccggtaaccaattctatccctaagcttgaaagcgaaacgttttggatttgttgctcagtcctatacttaatatgtatgtatatctgaatatttaacataactataactgtttttatgtatctttaaaatacacaagaacatacaaatttaaactctatgcatcggcagaattacaagaagaacaccatgcttgatcagttgatcttgaagatgttcaaagctttgatattactactctggtacgacctctgaacaaactcaaaaataactcggttccttttatcgagagaaccagaattaaaccaacggtaaccaagactcaaattcaaaccatgcatgctttagtttactgatcatatctttatccagtttagctgagagatcatttattcttcatcacttaagactatcaaatctccatcttcaccataacattttgatcttgtggtctaaattctacaatggagaaagctttttggaggagattctaagaccatctccaacacgcagggttctctcatcaattttaacaattaaaataataataaaattctgaaaaggagaagagagagagaaactcatgaaacaattgtttctgaaatctcttgggagagagacgtctctctactttaaaagattttacttgccagatgttttatatttattggtcagatttaactaataactttaaatttaactaactaaaaaaactatgataaaaataatattttttatcaataaaggacatttttgtgagaacctaaccgttgtggatgctctaagcagctgaagtcgaggaaactaatctctcgtctcttccatacaggttcgattctatgaagaactgggagctataaccctttgataaagcctcaatatgatcccacatatctgcggttatctaagggtttagaaatatatacataatgtgaattcgttgtggtaagtggaaacgtatggtatgaggtcatgaatgtaactaaggaacttgaagatagtatcatctatattaggaggaaatgcaagaagtcttatatactatgattctttacatgtttattattcttgtgcgcaacaacagtgtacaagtgaaacataccactccaagtgaagaatggacaaacagaattagacttgaatctgatcatggacatcctcgaaagatctctccccgttaatggtttcacgattctctacatgttgcagaaactccataaccacttggtcggtccaaggagctccgttgggagcttcttcacctgccacccatcccaagtgccctcctcttggtgtcacaatcaacacgcagtttgggtttgcctgacacttctagttcttagatagactcaaaatcatatgattttcgtgtaaatgaatgatcattcatctcttaccttgatgtcatcgcgagggatacctctctcaggagcaatgggatcatttgctgcctgcatatcatataaacaaatgaacatgagaaaaaacagattctaagcttatgggttcatcactcattgttcaggaattcacctgaatgcaaagcaagggtatgcggacatgttttatagctttggagctgctcgacttggaatagtactcatctactgatttgaaaccgaacgagactgttacatgaaataaagaaacaaatgatttgtagctgtatgcccttgtcttctcaaagtatcaaggagaagatataagtagatgttgacaaagctaacctcgggttaagccatcatcgaaatccctaaccgtctcagcatttgcagccaaaggaatgttaaattcacctcctatgtcttcaaaaagaagagaatgtctgcataaagatgaattagtgatgtgacaataactaaatggcaagaagataagacggatgtggacaacgaacaattacttgctaaatattctacgaagagatttcgacaaggccttgtcataaacattgttaaaacccttatggaaatcttcatctgctataaccaaatcaaaaggattgcacaaagaaacagcagcagtgagaggacagttatgagattcctgcaacaaactaaaaaagataagaacttggtaatatctcctacataaatttccaaactcatgggttaagaaaataactaacctgacccaaatagttaacaagaatgttgcctccaagagaccatccagcagcatacaaattggcttttgggaatttatcaacaacatgatcaatcacttcaccaatgtctcctaaaaacgaagccgagtagaactgcattagcagtatcataatacttcagtaacaaaatgaagctaattggcactattcatctatcatcaccagaccatgaaacagtacaaaaaggaagctactttatgaatctaagatgaaccaagaaagagcagagaaagatcaaaacctgaggagtggtcacaggactatctccacaaccacggctattaaacacaacacaacgccattttttactttgagctcttaacaacatatgtctaacatacgaatcttgacttcctcctgttaaacctggctacacatttttttaaagttctgatttttaaactcaatacaaaatcaaaatcgaatttttgaaatgttgagtgttaccaacaaaatgaggattggtgaatcaggaggaaagtgcctatcttcgccggcgacccaatccaaagcaacagagccgttgtctttagttcggagacattcacggcggagtctaacgaaaggaacagaacgaaagaaagatgcgtagattgtctccacgtggcggttaaatccgattagaggaaacgcattgtacggtttagcgagtgagtcctttaacgacggtaagaaacgatcacttcctccgccgataacttcgagagagctgtggtgagagggacgagacatttctggattcgcggcggcgaaaactgagaaatgacggcggagagtacgaactgatgagattaacggcggcgatgatgtggcaaaggcgactctcgccatttgcttcaccacgtcgtcgttttggtaaccacaacgaatttgcctaaccgaaaaaacaaagcaacatttatgtggtcgggaaatctaaactaatttgcaatcaaagcccttgaaatatattattataacaaaatcatccttacttacagcgactacatttttcaaccctatgcggctatgcccgtaggaacaatgggccttgggcttttatccccactttttgcaactgtacactgtgtctttcatgtaaccattacgcggtgttgaccaagaaaagccagagaggatttgatatttttaccactaaatgactaaatgcaatttattagtagcttttgaacacttcatccacgtgaaagtctcccaatttggtcatttctatgtattagttgtattaaataacgaaatcaactttatattttttatggtaaaaattatgtaaaagtcaaattttctaattacaatttacaaaatttacacattgactaaccaatttaacccctctactcagctattgaactcaactccgccgtgaactttctcctccctttaccaccaccaccacaacctcttccgccgcaaccgtttcttttaactcttctaactctacactcaccaacatcttcatcgttgtaactcaaacctcctccaccgcttttcgcaagcgcagagcttgctttaaccgctaaagccgccatttcatctgctctcaatggatgattaagccatgttaatggtaaaacgaagtacaattctcctggtcgaagatcctcgcttccagggacagctaaaacggcgtcgtcgaaatccatatcgtcggagttacaaacaaagcttgtaggattcttttgaagaatctgccacactttcaccggcgttgaaaactcttgtaatgttccgtctggtaatatcagcttcgccgtctctgttctccgagattcacgtgaagcgcaagctcccattgttttagtacttctttgtacgtaactcgttgagttgactcgtgacttttagaaagtttgtagatagagaaagatagagagaagatctcgtctgtgtgtttgaaagagatacaaactactcgtggggctttatatatatatagaagaaagaagaagaagaatgagtgagcctcgtgattcggaaacttcaagtaacgttaggtttttgtcgtctagtgttcataatcagacaggacacagctcacgcaatattatttgtcttactgaaactacaaatataccctcatcatgcaatttagaaggagtaatttagattggttaatgtaaggggtagatttggaaaattggagatgaaatcgtggcgaagaaggagagaagaaaggaagaaagtgtccacgtgcaaacattagagacttgggacaaaatcagaaagcagacaagcttaggtggccggaggtttaatttccggcggatggggtgcatgaagcttggcttatggagcctcacgtgaaggccaataagactaagcatgggtagggaccaaaccggtctaatggtcccatttagattcattcggttgcatgggtcaccggtcacctaacgagagattcgggtctttaagtctatatacgtgcatcattcattagttttagtttaatttaatttgggtatgaacgtgtgcatcaataatgtgaattcaactcgaaattattgtgtgtcgatatggtattacggtccatcaacgctgtatcgaatttttttttgttacattttaaatattttaagtaggattgatttgttgaagaatatcgctttccgttgaagtttttttttttagaattgttttgtagtatctaaagtcggatacttgtgtaacaaccaaaccaatatatcaaatcataagcttcaattatatgaagttatgaacctctattatttcctaccactttatacttttttttctcaaaagaaacctattttagttaaactaacattaatgtaacgattaaagtagatatagtatattctctgcttttcatatatgtttgggattaggaacacccacgtttcggccaaactttattttttagtttgtgcgtatgataaatgaagacaataacactgattttgtccgatttctgctgtcctttatatatgatcatcagaaagaactagtcccaattgatgaatacagtacaataatgtgtgttcatactattatattttatggaacagaatttgactagccactaattaattactaatatggcgtaaattatttaacctaccatgacacttttattatataaaaaacaattattgacgtttataaatatagaccacgtacgatggttcgatctctggagagttaactgttggaactcaattttacatatgtgactccggccaattttccggtgacttttccgttgatgtccgtcaccgaaatgaccggattatggagtttttggattccttgtaatgaacactataagatagtgtagttacatataaaaaataaagttattataaatgagtaattgaggtccaaagtggtgagaaataaaaggtcggtcgggtttttcgataacaaatttgcggataagatcatatgagaaagttgtgaggaaaattctccataaacaaactgatggagagggtttgtctcggagtacgtcagcaagaatgagcatgccaaagccacttggcagagagtatccttaaagagcatgttagcggagaagaacctcccaaaactttttttcttaatatagagtttcgtctttttttaagtattttgttattagtatcaaaagttgaatatgtgtgtaatattttgtaaccaaacacaacattttaattttgaaaccctccagctgttttttttgtctatatggttataaacgttgttgattttgaatcgcgaacattttttgaggtaaaataaacatgagattggataataacaataataagatataaattcttcagaaaaagactaaggagatcttcagtgtcaatcatacacacgcgtacgaaacctactgactacgatctcttgatacttgatgatcagtgaatgttacgatttgcagtaactatatataaattggatagtataaaaatttattcaaatcattgtcattattgatatgagatgttaattagttgagtgtttaagaggtaatattctatttgcattctgtagtgttatatatgtgctgtcccacgccaatagaattggatctttttggttaaagactataaaattgtttatgttattacatgtttcaatagttagttactcaatcgcatggacgacagttcataaaagaaaattttggaaaataaaaaacacgataaattacaattattaatttccacgtgaaacggcattaaactatttctacttgtcgcgttaacctattttaaattacagggtgttgaaacttgtttatattcgtaaacacacaacaaaagtacaaaaaatcaatccaaccatataatacacatactcgtcgttttcccattgatcatccaaaggaaattgatccgacaatggaaacataaatttgtcaattttcgagttttaaacatgtttggcccccaaaaagaagaagatttaaacatgcatgtatataatttgtttaaccttgaattcatttttcataaaaattaaatcatctctgaaacctaaaaaaaaaaaaaacatgtatacacactagattttaacccgtggaataacgcgggaacaatttattttttaaaattagtatatataaaagtttataaattgtatctatttataaaatatttttattttatagtttacaattgttattaagtaacgtcttgctaaacccgtcccgtaaaaaaactcatttattttattaatgttgatcttatttatgatatgttaatgaatcattacctaaatattttgtaactttgtagtaataaaatggggtaaacgacctgtgtccctttcggaagtttcatataccattagaactacacagaatttcaacctcgatcttggtccacacaaatagaaagttctagtcctatttctccctaatttgaaagttcgaaacctcaaaacacataaacgcttgattaattggtttataacataaaccgatattaaaccacttaaaccaatcctaaaccaaattaaaaacctgacccatctccttctaccccatttgacccgtctccttctccgccatcacctcccgatcacaaaaccaacatatacatctccattcctggagtttcgaagcttaaaggaagagaagcgaggaaaggcgatgtatttgcggcggctcgacaatggaatcaaaggacgagaagtatcgataatggaattgaaattctccgtatcgttgtccatagaagaaactgaagaattttcctccattgtttttggaaaaacatcatttgtgaacacattatttgaaagagcattgcggatatatgaatttggaattaagtcaatctcaaattttagtctttgactgaaactctattttgctcttctttttaaataaatttttctggaaataaagcaagtcctgaggggaaaccatgacatcgttcgtagaggagacaaacccaacgatttggaatctcattattgtctcattttggtgaatcgttatcattttgtagcttatgacacggtttttgtgccattaacatttcaatagttgcagagatcaaaaagcaatgtaaaacagagacaaaaattgcagagcttgagtaaatcgagttatacaacaaaacaacaaagccgacttaatcataatcttaaaaagcaaaaccaaaaataaatccattgtatcttctaatcttatttatccttgactgaaagtgtcttgagaaagtttgttcggagaaataatgcattgagaaggctctaataactatctgatttatcgtgtggttgtggctgagatgatttgcaacgtggctgatatgatccgtcttcatcatcatgaatttctccctcaacaatcaattgattaaatttctgggttctctcaaattctagtgttctttgattctgagatttggggattttcgatcttaaatcgggtctactcaggttaaatccggttccgtttagtcctaatgtggttaatgatgtctgggtaacaataaaccgattataaaccatgtttatgtgtgctttaggtttgaattttgattttatgtgttttgaggttttgaactttcaaattagggagaaataggattagaacttttcatttgtgtggaccaagatcgaggttggaattcggtgtaggtctagtgttatatgaaactttcgaggggcacacaggtcgttcacccaataaaatgctatcaaatatctatgttgtttgatgattataatcgaattattatagtcatgcagaaaaataatatcaaaaatgataattttgtaataattaaataatattaaatattttggaagttttattttagtaactaatcgtgtagttactgtgtagagattttgggaaaattaaaatccactgacagccattgtaaataagtcttaactacatgatttatttcacaaaatgactgcaaaaatgtatatgtagatgtctaaaatctcagttatatgaagcctcctagaaccctaaaaaaatcaaaaatcataacgttttggaattaaaaccctagaaagaaaaacaaaaccctagaagaatggagctctatgtggactcccttttctcctatgtcgtttcttcatcaccggttcatcaatctcttctgaaatctctgtaacctctgatgaattttccatcagctcatcaagttgtgacccaagaacgctcctaaactgtaaaattcacaataaacaatgttaactttacatataacaaacaaaagtgtaagaaaaaaaaaaggaaaaaaagacataattaaccacaaaccatataccttgcattccatagaacagaacaaagcagaagaagcagcgtcaatttcccattcacaaattttacatttatgcataacattgcttctagaacgatgattattattgccacgtctctggtttatgtaaacaatcggaaacccgttgatcgaatatagatgtatccctgatatatccatatattgtgacatcgtctctttctttactcctgtttggcgcgaacttctatatgtctgcaattacatcaaaagccattaaaccatcgttagatattatttgctacgaatgttggaactaaataataataaagcaattttatagaaaagatcgtttacttgaatcaaagtatggcctttgtgatcgttctttttgaagcaagtagtgcaaaaaggaggaatcaaacaatcacaacagaagtaacatcgccttttttgtgtttcgcctttttttggtgtatcgtttttttttggtgtatcgtgtaacttttgatcgcaaatttcatggaaaagcttcgacttcaacatctcaataatccatggataccttctgatgcagctaagaacttcaacggtttcttgcatactttctaacattattgaatcaatgtttggaagcaacttgtgacttttttttttgtacttttatagagcaaacagagtttccgataaacttggttagttggttagcaaatatttccttttctcttctcttttccaaaacagagtaggaaatcttaaaaaaaaaaaaaaaaaaaaaaaaaaataagaataggaaaacttaggtttttgttgagcttcatactttaatctgaaattggtgagattattgggcttattaaggctggagaaagtctcggcccattaaggttttcaaaagaagctaccacctgaaaacgtcgtcgtttctttgtgactaaaacagagaattcatcagtcaaatgcaattgcaatgtacaataggctaatagtttggaatcaaaaaacattttgttgtaaagtgtctgtatataacatttggtaaatttatttcaatattaacaagacaagtctctagagttgtatataaaaatgtacatccatgtcctatgattatgattcctatcatctataactataagaagacatcataataagtctctgttaatgtcaatagtataaagaaggtaaactccaaaaattgaaaagagctgaagcaagtaacagaaaccaacacaagaaagccaatgcagccgagacttggtattggatacagaggctaccatcacagatctttccatcagcagacgcaagcagttcagttgcactagctacagcacaagcaccaccaagagaaagaaacgaaagtacctgatacaatagagatatcaccataagaagaatgcagagcacgtttaggagattaggtaaactctttgttgcattttgcttacgaaatcaccggcgaaaacgatggaaagaactcttaattcttgaggaaggagtttcactaagacagagtatgtgtctgtcaaggcaagtaaaatgctccatggagttacaattgccatcaccatcgctaaatagctaaacaacagatagacacagagagatcaaaatcagtccttatgaatcagttatcatgaaaccaaccaaaaccctatcctcaagagtgactttttgattacaaacaaaaaacattgacttgagcaaaaccctattctcaaaacgttttattgatcaaaaccctattttcatatttgatcaaaattcaaacttttcaacaaattaggtattgattaaacaaacccatatccaaagttcactcctttcgatgatcagattcatcaattcgaacccaaaacccaaaaatcaaaattgaataagaatttgaacagaattttaccagaaagtagtgaaatcatagaaatcgaaatcaaagcacatgaagatcaacgaagcagctgagaaaatggtttggccgaaacggagagcgaagctggcgctagtgccgaacgatcccggcacatgctccatccaatttcaaacctaattctcttcatcatcacaaaagcaaaattcaaatcattttctcgagaaaatatttctgagaaaagaaaaagaaaagagaaaagtgagccaaagggtcatacctgtaacgccaaatggacttgtgtgtttgctctttattctcttttgctctgttttacaaaaataaatttactttataaactaaaataatactaacactcttcacattttcatttaagtcttctttctattaaattatttatttcctaaaaagatttgtaataatttcaatattaatgagaatctattgccagtcaacagacttttgtaactttaaaaattggtttatgaataccaaattgtataggatgttgtttaatgtttaccagcttcttgttatgtatttggaacaaaaacaaattgtgattatttcccaaagaagttataatgttatatgtattcctcttaataatacaaaatgcaattattatcaacaaactggctgttttagttgttgactacttatataattggtatttagtgtcatgatgaccattttttttttgtgtatgtataatgaaactgctaaacttttagaacttttgcattttcaattgtgttcaactttaaaatattttaatttagttgatttttttatgtacctaaattgacactctatgtgctggttccaatcaacaaaggtaggtcgaccacataataatgaaacttaagtcaactttgtaattattataagaagaaaatgcaaaacaaatattttatactaaaacataccatcacaccctacttgaattcacctaaatcctataatcatatcatttaaatagaggaaaatacttttttatagttagacctaataaattcctatttgtatgataaatcacaagttgtaaccaataggtaactcgatcttcgtcctctcgttccaacttccaattcatgttccatttgttacggttcattaaacttgcgtgtgtgtaactaaagaattgattaaactaaaacttgatttctcaaattattcactgatataaatatttatttatcgagcgttaatatatatatatatatattgatagaaagaagttgtttcaatacaattttacaaaagtaacaaattatatgaatcactcaatctgaccgtaccaaaccccttggatcttcacatcttttggtaccttagcacccaagtcagtatccgatggctgaagactctcgaacactccgatcacttcacctgtctccggtttgctctttgtgatcttcaaagtgatctctccgacggaagccgccgtgttcttgacgttttccttggatagctcttcctcgtctcctctgcctccggcaggcaaagccactgcattatcgtacccagtggatccaccacgaccctttgggtccaaaaaggacgagccacggtacgatggaactaagaacttgccactgaagctttcgggtttccctgaagcctcgagctgcttaaccgtgaagaggaacggcacgcgttctcctcccggaagctggactgtgactgctgcgtaatcgataccatcttcttccttgaacttcacgcttccgtctgaaccaacctgatcaaatgacaacaattcaattgacttgttatcagtttcttgcggtagaagcaacaactggaaactgagattgaactaagtgattgaagaaaaacctcgaagggtccttcgatctcatcgagtgtgtaagtgagacgggtcatgagcttggtgttttggaaatccggcggtgcattcttgctgacgctatctgccttgacggtgaaggaagtgggctcgaagcagaacttcttgcctgtgtacttaccagctttgaacgagaatgtctcagagccaccatcgatagttggacactggtttgccgtaccggtaccctttacctccatgtaagtcttgctctgtatctcgtcgtacgttagcctctttggtgctccctccgcaccggcccccttcattacccaaaacataggttaaaaatactagactttgcaaataaacatgcaatgtaatctacatatattactgtgacataacaaaacctctatacactaagctattagccctagccaacacaacttcttaagtttgttttcttcaataaacacaaggcctataaattttgttaagtttgtgagatgaatgagaatatgaagttataccgagacaacgagagcagaggtggctagagcaaaaccggcgatcttggcggcgtcggagcattttccagcgaagtctttgaggtcagagtggagagagcacgtgagcctagcttgtgaagagtctaacccaaaggacttgcccacggtttggtttgatcggagatggacattacgagaaggagaagcggcaatcttcgccggttgaagaaaagttgcggcggcttggagagaagttgccatgatgacaagactcagatgtcaatatgtttgtttgagtgataatgcgaagttgagtagtaataatcagaggagagattttgtttcgctaagataaggtcggataagttttgaaaattttccattggattgttttcatgactatatggtcgatcaatagccacgtgtctaaagctgatgtggaaatagagatactgtcccaatcagtattgatgacgtgattataatgttatcaattccactggaatatataaagttgaataaatagtttggttctagaaacggttcaagaccggtctggaatacaccagagaaaggataactaaatgttcggttattatgcttctcatatcacaacattttaatcgcagaatgaaatcacttatgcatatcattaatattaagatttcaatagtgatgatgaaggttgtttatgagaaagaagacacaacgaatgaataaagagtttattttattatattaagattcttgaatacaaaatcaaagtttacaagtgatttctcagagaagtatcatcgattgacttcgaggtatacacatctagggcagtgcttctctaaagatcagttgtttatctgttaggttcagtacattcatctcctgattcttacgcaaccatgtcaaatagttagaattgagagtacatccatgaaaagccgtcctcacatccacaatagtaacataacagttataatttccagaaccaagaacacaatagtagctatgaatccgacccagcttgcacagattatcaaaaatttcctagttttaaaaacaaaaactgctgagacagtcaaacttctagatttcgatcaattgataagtatccaattcaataatttagactatagaacgaataaagtttatagactcaacgaagtttcatggtaagaaattaagaaaaggcactcagaatgagtaggaggtatatattcatcatgagaatcagatgacaataaaacaatcctcatcatgcctttttttcttcaattttcgagaatcacgaatcaaacaactttgaaaaacatttagcagaaaaaactaataagattgaaaaaagtataaaaggattcctctcagacaaatgcctcgtttgtccccatgatttaatgaatggatttcatcggactcgtcatctgtgtattcatcactgagaaacccttttttctaagataatcaaacacaaaaagaagaacaaatactagactaatgatatgaaatcgaaaacagattaaccaataaaacgaaatatcagaaagaattaagaagccagagattcaaatttgagttgcactcggagatcagagatgacttaagattatatacggcggagagagaagtatttataaggagtcagccaaactagggttagggttttaagccgcccccctacttttagacgacatgaagtctagttataaaattcaaacagcgtgtagttttcttcctattgaaaacgccacgtattgcgaatgtgaatactcgaaacggaagtcacgagtaatttttcaacactaggcaaacaacatgaactcatgaaggctagttttttttttacaatcattcaataaagaactttttcttatagtaggacaaacaaatagttgaaaaatgagatttttttatacatagaacattgattgagcttgaggtagtatttgggtatgcaacataatcagaagaaaggaacaccatagagacttgctctgctcgatgtttcacgcagtttattggagcagccgagcaagaaacaacttgtcgatgaaagaggaatgtggattacatgacacggacgattagagcccagacagggtagaccaaaagaagaatgatccctaaagtgtttgatactccacggggctgtgtgaatgagttcctgaatccacccgatgctcgaatatgttcttgaagaaggtaacatccaatgaaaaggctgattacagtgcctatccaggttccacgtatatggtgagcaaggaagtgtggagaaactaccagtagcaggatcagagaacctggcatctcaagccaatctgcacattttgaaaaccacaataacaaaagtgtgagactttaattttgtttcagcaattacactgacttgaatgttagtatagatttgcctcaaagcattttaaagattctcgagacatcttcagcgattgtatgacaacaatacaaagatacaaatcaagaatgatatgaagatgtcatcacctgggaaatgcttagggaagaaaagtctgagaacaaccgcaacgaaagcaatccatttcccaacatctccactgataacaaaaatcgaaaaatgccacttacaccagtccagtatatagactacagttttaagaatagttgtgtcttttgacaagaaaagattgttacctgagaaagttgaaaatgacactaggaaggctaaggaagatgtatggtattaggagtgatgtaagcatcttggttttccaattggtacgatccaaaattaacaagtaactgcatcaaaaataccaaaacaaaaacgttaaggaaagtaggaaaccatgaataaccagaaagcttttctaaattgagtaaaagaaacaaagacactctcacacccttatcatgtttgtgctcactgatcactgatcaattctatagtttcaaccaatcagagatgctattgctagaaacaatagggttactgcaaatgtcaacaaattaacagaaataaacagattttttcgaattcaacatgtacgagattacacagtagtcgacttatcgaaaaacccacgagaaaatcaaatcaaattcaaaataaatcgacgagacacgaaatcagagatggcgacttgaaaaactcacatggcagcgaaagaagcgaggaatttgagaaaagaaacaccgaagcctaatccaccaagcttcgaaacatcgctaaacagtttcttcgcagcgaccttgagctcttccatatcggaattgactaacgccaccgtatcgacgtcgtcggtcttcatcgctagataatccatacgccccattattttttcttcttctttcagagactcgaagcaaatcgatcttcttcgttggaagtgtttttctttttcttttaattctcttccagctgtatccagaatccagaatcgtcttgtcacacttctgcttctttcccaaatttgttttttttttttcttctcttcaatcgttcctggtttatcgccgcaaaccgattgtgattagtgacgtgtcgttatctggttgaataatatagtattgaagtgaaaattaaaccgccatgtggcaggcaaaaacaattattcggttgacctagtcctttgatttgcgcgttttgttctgttacccaacctcaattatttcagataatcggagaaaaaaaacaaaaggtcaaataaataaataaactaaaaaacaatagccgaatattataatttaaaaaaaataaatcagtttttgatgacaacattattgaaatattttgttaattttttctactacaaagtacaaacaatgatattattccaagggaaaaatcgaaataaattaataaactatatgattaacaatgaacatgatattattcctctgaatttttttaaaaaaagaaagtattttaataaatattagttttataattaaatttttaattataaaataaaatttaaccaataattgatatacacatgcttttattagtttctcataatttttcacttgagagactttttctgctttctctcatactttttaaatatattttatttttatattgaacagtttcttagtgataaactattgatgaagatggttttatactctacttgcaccactttaaagcatcttacaaatttacattcataatctctaaatcattatactatgattctctgaataacaagtccatcagggtgtgttttagagttccattcaatctaaagtatcaatctttttctttaagatatacagaagaagtaaaaatacaatttttagaagcacaagatgattctgatttatgtactaactaagaaaacgtcgtgatcttctatcgaccatcgttgcctcctgtgaatcacaaacttgagccgaaaatttgcatccgaacttcttcccgattgaccatttccccgccccatgcttcgccttcaacaaactttctttgtcgatcttcgcgatcactttcttcaagtacaagcattctttctctagctggttcactcgtgtcctcatcgtatccatatccaaacgaagcacctgattctccttcaccgcttccttccatctacccaagtccaccaccgttttatcaccgtcttcctccgtcagtaaagtcccagtgattacttgccggagctgtagctgctccaaaaacagaacttgtacgacggctcgtagtggtaaacgctcgttttgtgccgcgtgtgtgcatccttcaacagtcagttttctacaatccatcacgctacaaatcttctccttctcttcctccaatatccatgaatgagtctataaaaacaaaaatcacaactcaatcatcaggtgctgtggtgtagtggttatcacgtttgccttacacgcaaaaggtctccagttcgaccctgggcagcaccaaaccatagacaattttataaatttttataattaattaccttgaaatatatatcgacggctctgtatagtccatcatcgtaaacccgtgcttgaaccggaagcaaaaccgccagattataaaactgttccggtttaagattagcgtccgatgcaatttcaccgagaactccgtcgatcaatctcccaaccaccgtcaatgacgacgacgacacggcgacgttttcgagaaaacgacgtaagagtctctccaccaaatcaatatcgtataacgtttcgttgagatacgagtaacttggaatgagaagatcatcaagcgtagctttctcaagattcgatccgatttttttctctagaaacttcctgcaattctcggaggcgttgagaatgatcgcggctcgtaacaaaccgaagagagatctcgtagtcgtcgcagttaatggaagatctgaagttatcgtctctaataattctctttgttgattctcggaagctatggtggtggaagaagaagaagaagatgaagatgctgacgatgaacgcgagattcctggaatgtgtttcttcgcgtaagtaagtagagatctctctacaatctcaggactcaggacactcgacttcatggataagatcacacgtctgaagattggaaaactcaactccgttagatcttcgaaccaaagctctgttttcgaatctttgctctgtttcttccggtcaacggtgaatatacctccgttgtttattggccaaccgtaaaacgacgacggatcggttgaggaagcttggaagacgatggagtctatacactgttccgttatacagagtgattcagctaaagacgagactgattcacaagctttcaacgctttgatggattcttgtacgttagtgaagacgaactctgaaagaaacttctctgtttttgaaatgagattctccggtgagtactcttccgtcatttctagatactcggcggcgcaacggagtggaacagctgtggaaacagagatgtcgactttgaaaccgtagcttatctttatcaccatctcgaaaatctctgaacctcctggaaaattctcgagcttgatgtgagaataaactttactctgttcttgctctgttattagttggtgaagttttttgctttttgacattagaggaaactgaagaaagaatgatcaacatatcagttttagtttttaagagtaaactctgaaagaagaaaaaaaaacagagaagaagatgagaccttatgaagatgaaatgttatatcatcaacttcgatttctatgtcacttggtaagcctgtggtataaaaaaacctacacaagagataaagattttataagtatttgaatatgaaaacattactattgaaaaaaatgagtgttttgttcttcttcaccatgcttgcttcttggagttagccattggagaaaatcacagaaaaaaacaaagaaagaaaatctctcgatggaagtggaagctattgggaatgagattatattcgggtttttgagaaaagtgaatcgagttttttgatcaattctttagcttaataataaatatttctgtcttttgctttttataaaaggaattgattgtttaatatttggatgcagaacagccagaatctcaagaaattgggcattgaaaagaggcaaagtcgcactcatttgttaataaactccctccaaattttgctttataaacttcttatttgtgaatacataatgattctaactaatctttggttagagtattttttaaaaaaaacactataaaaatcttcaaccaattatggttttaatgcggataacaaagatatggtggcccaaaatttattatttttttgtatgtatatataatgatgatttaaaatgcctcaatcatgctttgaaaatttgttgggacagaacaataatataatttaagatatatatgaatgtatcaaaatcaatcatgctttcaaagtcattcatttcttcttctttctatcaaacccttttgtgagttatctctatgcatgttacaatttgtataagaattcatttgagagagttaacctaacaaatgttgtactcattctttagatgacaaacaattagactaaccaatggttaagtcaaactaactcgttgattaaaaacaagatattatattgccacataaacaaacggccaactgaatgtttttacccccaaccaccaaagtagcctcagtgatataaaacaaaatctacatgacgaagacagggatatgtatgattaatgtagacaagacattgatatttatgtcagaatagaaaatctatggtcggaagagtttgccttgtacattgcctgttttgttaacaactttacaaagaagtttgtacaacatcaagatttggttcattgttgaccacactatattggcattagtagttttaaattgtagaactatatgtactatatttatatctccattagcatgttaagtattttaaataatgagtttatacttattatggttggttgcttggttctgcaagtgaagtagtattatgcttattttaaaacaaaaacattttaaagcttatatagaaaagttagaaacaagaaaaaaatctctaaaacatctgctgttcgattatattgatacaaatgtcattgtctaactccatttgagcacaagttcttcccattttcacttcccaattttatggtttatcaagcaggagttgaacacagtcaagaggcctattagcaggaaattaatgttcatcagagatcttaataaaatttatcctgttaccatggtgaaggagcagtcaaaggcaagttttcatatctcaagttgatttttagagttttggtgaaactgatggtacctagcgttcttatcgaaagagtgaacttcaacagaaatactatacaattaaaagaatttgatttactaacttttgctgatgctaaaacattgcagcagttgaactttgaagaagaaggagaagtagaagacccttaaaatgtgtattctgagattctgtatcattatcaagtagaatacaacatttgaacacacccttaatttgtattctgagattaaagagcgctctctaaggcattatataaacccatgatatgaagcctgtacaagagagtagaagtaaatgatgtgatcatatctcatcggagtagatacactcatccacgagctgacggagattaggattctccaatgcagccaccactctttctttatcattcagttgtttgttaactgcaatacaaaaatgatcccaatgagtattaaagttcagagcttaagacatcaactttcccaaaaatacaaatatagaaaaccagattttgcagtgatgttaattagaaactaaaatctatcaaaccaaggacaagagcaatgtttataatttacacaaatcatccattcaatttgcaatctctatattagttaaggtttatagaaagcatatatgaacttaaaccattgcgaagagatggtctagtaaacataagacttcctcacctgaaacttcatcagcgtgagaacccggagacactctgatatcaacctaaacataagtaaaacaaaacagaagcaatcacacatatgtaacaactaacaagtgatcttgagtatttgtcttaatcagaaaagagttttttaaaagcaagatgaccttgtaatgaagttgcaaacattctttaagcttagctctcagacacagaccaattatatttgccatactacaatgctgaatcgtcggtgtaaacgttatcctgagttcatcacataacccaaaccagcttattgttaaagatcatgcaagtaaccacaaaaagaggcctcaacattagttaccaatacagagataaaaattggaactttcttctgatagtctctaaaaatcgattcaacaaagaatgatgtttaatataaactcacaggatgcgatcgagcttgtcatcgacagtaacagattcttcagagacaacccttagctgctccaaagtataagggtgttctggatctcttatatctcttacatactttgtccattttcgtcaaagattccaaaaatatacattaaaccccccaaaaagaacaaaatccaaaacaaaattgatctcaaaatagaaaaaggatatcatatatttcaagaggatcaacaccatcatctctatattgatcttctctacgaacaagcccttccttcttagcttgcaccactggattcgcgtttatcagtcccagagtcattttcttctctctttcctcagtcttcgttctctgtattttaatcagaagtgctctgcttacaaggtcacgggttcgaagctccaacatttataaagtgtacataattaaatgtttctcataaagtgtttcttatttaacaaagaagcaaatttcatttatcaacatttgacaaaatcttcttaaaggttttgatttttcggtgcaaaacggtaaactacaactccgattctagcaccttcttgaggatcatcacaatgtataacatcaacatcgaagaatctccgagctttcttgaaaaaaatcgattctttcttccatctcttgaggtgagccataagaaacactctctcggatgatccttctaagagcagaaaacgcagcgttttgaggagaggttcataaagatgaacgtgataaaccacgtcagacgctagaatcaagtcaacgttttgacccaaactttccacgtcatcgatttcgccccaacgaagagacgccacgtggactttcccaccgaacttagccacgacttgagcgtttgcgtcggcgttgaatttgagattctcgattacgtttgggagatccgtcaccgtgacattagcacctagtgtcgcagccgctgcgataccgacgattcccgttccagatccgagctcgacgatgttaatcggagaagaagaatctgaaccgtcggattgaaaactcgagaaggtgcgattgagaggactaatgtttgggtcacgacggtagttatctaaaagcgtgacgagagttgttgcaggtatccagagcttgaaggcaatgccttgtgtcggtaactgacgaatcacaaccgttgattcgatcgaattgatccggtacttctgaagctccgattctacgtcgactactttttctccgatgttaacatcgtcgtcgtcttctcggagagccattgattgtgaccaatcctcacgacggccccgctactatttattagggcactcaaatttggttacacgtggagggttgttattggtgatgacgtcatcaaatgtaattgaagaagcctctaagatagagagagggtttgaaaatgtgagattcagagtttgtcagcgagagagacgaagaaagaaagagaggagaggtggaagatgattaaggcagtgatgatgatgaacacacaaggcaaaccacgtctagctaaattctacgattacttggtacgatgcttgttgagatatgtttttcaatttcggtttcttcgatcaaagtgaccgattttgtaaaattgggtttttgattttgttttttttggatttcagcctgtggagaagcagcaggagcttattcgcggcgtgttttcaggttctcaatcactttctgcatcttacgatacctaacaatttcataatctgtatcgctaagatctgggtcgatcgtgaaacttgagctgaaattttgtttttttgttttgtttataatttacagtattgtgcagtagacctgagaacgtaagcaattttctggagatcgaatcattgtttggaccggtaatggcgtcttcattgtttatgctatataaccacaatacttagtttaacaaaaaaaaacgttgctttggacacttattatttagtgtgtttgcaggactcgcggcttgtatacaagcattatgctacactctattttgttcttgtatttgatggttcagaaaatgagcttgctatgcttgatctcattcaaggtccgtttttaatcactatggttcttagattgcaatataatctgaaatggcatggtgtaaaacctttttccattttcaatttttgtgctttggaatgagaaaagtttcatagatgtagcttgttttgaacatctttaaccgtttagcttgactatatatagaaagagggaatttggaatcagagtcttgaatagtagagtttgtgcagtgtcttggctcttttattaaagcttgttgccgtgaatctagtacaaatgcatatgagtggtgtgcgagctcagctggtctgcataggatgtgtttaaaagagaactgggtgttgagtatttttggattggtattgggttcagtcgagagtagagattctcttagatcaaattagttcttcgtttttgtgaatacagagactgacttagcatgccatcgactgatgttacatatgaatcattgtctattcctctgctcgtaaattctttttgcttaacgctttgaaaatgtattctcattgtatgatgatttaaagttagtttcttgcattggcagttcttgttgaaacactggacaaatgcttcagcaatgtctgcgaactcgacattgtgttcaactacagcaaggtaatcttattacacagaacagtttgtcctgcagtgtagttgatattattttcagaatttgctgctgcagattggttggatcttttagatagctacatgaaacaaaagcgtgtcaataatatagctttatgccttcttctttctttccttcattgcagatgcacgcggtgttagatgagattgtatttggaggacaagtactggaaactagttctgctgaagtcatgaaggctgttgaagaaatatcaaagtagttccctaatccttctctctcaatcagtctactgttttctgcatttgtggtgtggaaataaacagttgcactttcggcattgtgcagattagaagctgcctcaaattcgatttcacttgtccccaagtctgtttccgggtggcgtggccgttagcttcgaaaaaacttgcctgaataagtcagagaacatgtaacaaaagcttatccaagtcttgatccaaacatgtttgtttaatgagcgtggaatgttgcgtggatgggctcagtagtctaacgtgggcctgtgaattgtaattgggtaacggacggaactgcttgctatttttgagaatgtaacaaaaacgacgagaagttaagatctataaatgataaatgatgtccaaattcagattttgttgtggagtaataaaactagaatagaaagtatagggagctacaaggtaaaatataggaagtacgaaaacgccgaacggcgtgcgttgcgttgtgaaaagagtcaaaacggaattcgatgggagaagactgaagattcgaaaatgtttgaagtgccaattcatatccaattatcattttaccttttgaaattcttatgatccatctctgcattttccagtaccagctttttgaccttttttagtacccaatagattgatagatacctatgtgggttttatatacgcaaaaataaaattggttttatgtgatttcaaagtttctagtggctattgcctaaccaatggtaaatgtacacgtttaattgctcttttaaaaaacaccaatagactagttgtttacatagtagagattatacgatgaattgtgaggataatgcgaataggaaacatctaggttaattgtttggccattttgagagtggatatcgaaatatttgaagtttaaagtagttataataattttctatttagagaaaatcgacgattatccgaattaagatggaatgtttccctctttatgcactaaaagctaatgggcaacaagaacaagaaaaaagttggaaatgttgtgttgtgttgaagacaaaagaatataagtggaagattcaaagtggagttatttaattgggaaacgttaagagcgaaacacatatataaagaaagaaacttgttggataaagatgatacaaatccaatatacatttgtgccctagaagaattggtcaagctagcaaagatgtaccatggaccaaaagtgaccacctttgatcgtatttatatatgcataacttatgtttttttgttatatcatgattgatacctctcccaatcttggggcattcctctagttggtccaacaatttttctttttccacttttgcccttttcacttacgttggaccactcccacatttgtttctcttcttttttgcattttcctatatttatctcctttgatttatgtgattatttcatccattacacaaatcatttaaatgtatatattacatttgaaaatgtttgaagtgcaaattcatatccaactagagtaaagtcttactaacaccaaaatttttatatttgatcaatgttaagataatttgtgtttctaaattgttttagaaaagcaaaattggagctacaagtatactacagtcaaccatatgtatactagttgaccgaatgcaaaaactgtagctgaagtgttttaaaaatatacaaaacagttcataacatacgcatctttaggaaatgtgaagagacgctttcgagaggacaacatgaatttacaggagacgtagacaaaaaaaaaagtcttaacatatgacagctggaatttgtactcttataattgttgttatttaattgcaacaaataaaaacttattttaaagtggttatacattaaattttgccatagactctgattcaatctaaaatactaaacgcattgaaactcaataagtttaaaattattccttacattttgtgtgaaaactattactaatctagagactaactacctctgtatagacatcactattttcacattatttttgaatgtgtataacagttctaaattgatatttatatttttcacattttctagtgtttatgatataatttgaaaagcagaaagcattcttagttagcccctataatgattttttacattttttatgaaggctaccatacaaacagaattttcaaacaaaaaaaatgaaaaaaataaagagaaagcagaatccatcaaaagggcagagatgagaaaacattccagtcgtgttttgtaacttttgaggaatgtcccgaatattttaattaatgtgaccaagacgactcctaaaccaacacacatactactatattctattttaattaaacagttaagaataaattagttgttgtttaatgacatatcattagatcgctttaacatgcatgcatgcggagaattaaatctcgcgggcttctgtccacgtggcgaccctgattaacgacaaacggattaattcaagtaaacgtcgtcaccaaaaaacacgatctctgtcttggaactcgcgacacttttttggggaacgttgtggttcccaccgaatccaccgaagccaacatcatcatcatttgcatttgcatcatcccatcaaacatcgtgtagttttattgctctcgttctggactacgagccggtcttctttttgttttgcgtatagccgtttggtttttcctttttggactactaaaatactcttgtccacacaaacgtcaagatacttaaaacatctcaatatttgcatatgaactagttagtagtatacatgtatatactcgtcggaagtgacattttttaagattgtgaaatattttgcgatatttgaatttaaaatagattaaaaacgatttaaatttcactgtaaaagcaaatcccggtgaataattacagaaagccgatcttgtaccgtagttaattacgtagttagtttatgggcattagagaaatgtttggtttattcaaatcactaaacaaccacgcgccattatagctcgtgagagttttagaacgtgtgggtcgatgggagcgtattagtcacgggtggttgggtcgcgtgtgtgatatttagtagtagctttgcatgtagtggcgaagcgtaacgctttgtgtctcggggtaatcacggttttatgtttcgagtttatcaaattactataaatatagattacgtacaataattaagagttataaattgtataaatataaacgttcgacagagcatcttttggaaagtggtggtcgtcccattagtcgaactaagtttcggcaatctcaagacgatctgattttcacctttttaatagtatatctattttcaaaaaaaaaattgcaaggaattgataggtaacttgcgattgcgaaacaactttaacataattttaaaaaaacttgagaaacaatgagatagcgtagtaacaaaatagctaccattttcatgtatgtgttgatcaactgcatcgtcatttgaaagtttattggataggtctcgcttttcaggtccgagtgtttagtatgatatttatcatatgtgtgttcgacaatgatacatatgtataagactaagcactaagcagattcgtccggattactcaacaaaacaaaataagattgagatttgagtctttggatcatttttctttttgggtcaaaacgttgatatttgtaagtttattgataataacaaaaagatataaattattgtttcttaaatagtcataaattacatacagttcctattttatcccattttttatagttaaataattaattgtgctaaatgatttaccaattcaatatatatatatatatatatagtattttatatttaaattatgttactgttaatgaaatgttataaccaataacttttcatatatatatttcaaggattttttttcaggtatgatgactacataatcagctacataatactacaaaacgatgaagtattggaatgcaaaaataatcagctattgactgaccatgatttgttatatttttgaaactcaattgcatgttttgttttgccagcatatatacaaataacatatctatttcgatgaactataaaaccccgtgattatccatggaaacatatatgtgtaccatatcattataatttggcgatagagaacaaaaaaaagttatcatgtggtattactattaggtataatgatttaagaggtgggtccaatagcttttcctttgtttcttttcactagttcaagatcaaatttatggggagtattattagttctttgacctttcctttttagagagtccttctttgacccatcaagattcaagagcagaatctctctcttgctaagctaagaaaacatgaaaagtggaataaatatttttaaaagaaagaagagtatagctcatacatgtgtatgcattggttaattgggggtatgttgctttgatgattgtaggaaggtacttcacttgaatagaggggattcttccctttatcttttgggttcttcacaatctaatctattagcttttcttttcatgcagtatttttcttgttactctaaacctcttccaaatcttcttggatattctcatatcattatgattccaaattcgtttctctttattaaaaaccccaataagaattggattctcatggttttcgatacgttattcagccatacgacgactatgagtgattctagtgagactaattgaggattttttttttctatttttacatgagaatactgaagatgtttaatttatctctgattaaatataatccattatacagcatattacgataagtaacaccgcctcgtttgtttttgtttagctagtaaaccgaaattttgatcgaatacattatataaaaattcatgtaaaatactctacaatataatactctcttgtagtctgaatgtaattataaaaaaatgttttgtgtagacattaggtaaaccatctagagtattagaaacaaaataatgtaagtaaacgtaaaactaagacgatttcatgactaaattattttgaaggtcgaaccaaccaatcttaaatacacatatatgaagaaatatatgttttcgaacaaatggcaatcaagaaaatgctttttgtgtgttaatgaaatataaggttgacacatcaatatcgcgttgatattctcattgtagattgttggttatgtagggagactaataatgcgaactagaaaaagatatgtgagtcaactaaggttagtgttgatatagcaactctcttatgtttttaaatttgccataaaataggttgttagtccaaatagccgatataaacatcaatagaagagtaattaatcgttccatcggaacatccgatgaaattggaacgagacctatacagaagaaaacaaaagagcaactaatcatcttgatcacatgcccaatatgcatttaagtaaattggagagaatgatatagaaaaacaagacattatctacaactacaagatatcaaagcactcggttaaccgcgtccctgtgaagtgttagttatcagtacatgaattgtgatttcagcatcttggtccttttttttttggacaaccgtcatctttttcttgatcggtttttataacgtacaaacatatactatttcaacagttttcttttaattttttttttttttgaatatacactttctttcttttatttgtttgattacaaaattttcaaaaaatagtgttcggcaaaaaaaaaaattagatcggccaatgcattatatcccctagcgtaagctctttttcaaccaatcgagagtccatgttttcaataaaaatagggttttattagtaacagtagttaaagcatttaacatacgtaatcccaaaaaaataaaataattctgtatagggacgaagactagtattcgttgacgacaagagtagagtagactctagctagctgcaagttttgaagaaatctaataaccaaatctaagtcattttacttacatcatcatggatcatcattaaccacatgaggctgagcagatatcgaacgtgtgattgcgatgtggagaagtaaaggacgaggccacgcgcaactgagcaggagcgcgtgagattcagggttttagggcagagatacggaaagagacagaggttttatagcattatattgaaagagaacaaataaaaataaaaatatgagcctcgtgatcggagatttttgcagtgatgactgtactcttcttcctcttctctcccccttgtcacgtgggctaaattttgaccacccttcttcaatgaccatcaacatcgcatcacactctctccttcttcttcttctacgttttttattttctgttaaatttcctccacaaaatcgataatttcaattttttcatacaatatcatagttctagtaaagtaaacattcgtgtgtgagtgacataataattgcttcaaaaagaaataacgaattaataagagttgtgtgcttgatggtccaaaagtcgtatgtttttcaccatcacaataagatttaccatatctacttaaaccaaacttcaatctatgatatttggaagctagcaatgaatgattttgttttagcatatgttaccgagcctattcatctttagattgaaagttttgtgtccaacaactagcaaacccttcgctttttaaaccaagatcagtttttctacatagtttcgactttttgttattttacttcccatcatattttgttttatttactactgacattttcataatgtacggtacattttcatatattagcatccttatctaaaagctaatcaactccataacgtacttgaaatagggatattttagttgaattattcaaaacaatcacacagtgacacagactctatgtagaccaagcatgtgttatgtaattagaaaaaataaactgtgattaaaatatcttttaacttgttaacttggctgcctaaagaaacttgatactgtatcatcgttcatcgtattttgtaattaataaaacataaaaaagcaaggaaaacccatttgagtaaatgatatattaatattacttcgtaaaaagctgcgtccccacatattctattgattttaaatactattcgtattaatataaacctgcatataagcgtacatatacatttctgattctatatataggtgtgagaccttcttctccattctacacttcactccaacgtgaaacctgcaaactgaacttatctcttcatattttctttagcttctcttaattttacacttagggttttcaaaccagtagagagagagagaagtgtgtaagagcgatgatgcagactccgtacactacttcaacgcaggggcaatattgtcattcttgtggaatgttccaccaccatagccaaagctgctgctacaacaacaacaacaactccaacgccggttcttactcgatggtcttctccatgcaaaacggtggcgttttcgagcagaacggtgaggactatcatcactcttcctccctcgttgactgcactctctctcttggaactccttctacgaggctttgtgaggaagatgagaaacgtagacgctctacttcatctggtgcttcttcttgcatctccaacttttgggacttgattcacaccaaaaacaacaactccaaaacggcaccgtacaataacgttccttctttctccgctaacaagccaagtcgcggttgttccggtggtggtggtggcggaggaggcggtggcggaggtgactctcttctcgctagacgctgtgccaactgtgacactacttctactccactatggaggaatggtcctagaggccctaaggtgacttatttattttaatttttattaaaatgcaacttcttttaatcaacacatgaaatgaagatttacaataaccaaaaagacagttcatccctttgttttgaatatttgcctatctgttttttcactaaaaccaataaatccctttctctatagtttaatttattgaaagaaacattaaataatgattttgatggttcagtaaatttacttgaatataagttttaaaacagatatttcaataaaagacattaatttattttcttttcgaatattttcatcactatatagagatttatgtattgaacgaacattaaatataagatatattgatggctaatgatgatatggatggttttggaatttgcagtccctatgcaacgcatgcggcattcgtttcaagaaggaagagagaagaactactgcggctacaggaaacaccgtcgtcggagctgcaccggttcaaaccgaccagtacgggcatcacaactctggctacaataattaccatgctgccactaataacaacaataataatggtactccgtgggctcatcaccactcgacgcagagggttccgtgtaattatccggcaaatgagatcaggttcatggatgattacggcagtggagtagcaaacaacgttgaatccgacggtgctcacggcggtgttccgttcctttcttggaggcttaatgtagcggatagggcaagtcttgtccatgactttaccagatgaaaggagaatagaaaacgacgttagattctcttaaaatttccatgtggtttaattatgtctaattaaaaaaaaaccaagaaaatatttctgaaaaaaatagaagtgtatatcgagagacgatgttgatgtttattgatagtgacggtctaacttatggtttatctataaagtaccgttctggtcaatttttaaaatcattttctaatatttattttaaaaatataaccttctttttatggaaatcttctcttctctagtctataaaataaacactatagttagattcttctattgattacacagtgatcgtcataaaacattacagatgtaatcaaaacattagaaagaaaaacaaaaaatgaaagatgtgcataagagaaaacacacagaccaaaaatatagacataggatataactcttttaatgtatatagtttagagttgaacggagaagtttcagttccacctgagtccctgaatttcacaactgagactttaataataataatattcttactattggttaataaaaaatagagaaaataaaataaaaattagggtgtttggtagtgaagattgaaatctgatcgtcgaattggggagagattagattctgatcgtaccaatgtgggttttggtactgttgtgttttcagttttggatcagagagcattgtagtgatttaatgaacatatatttgtcgtattatgctctgcttcttcctcctttatattttgaccgtcgttttgtcctttactcactcctctcttcttgaccttttgttcgtgtcaatatgtgctctcaagaatattgtttttcttcctttttaattacttactttttccgattttttattactgaaccgattctgcaacatgttttgtactagtaaccagctttttaatccatctctctctgcacgatcatataaaatatacgttattttttttcaattcaggcgtcgacaaagaaataactgttttgttgtacttaacatgttggatcatattttttttactgtaacagggcttttattatgggcttatcgattttcattaaggcccaatgaagaatatcgtcgcgagtgataaaatttcgaatttctgcaattactaacaattaacaaactcggccgtcgtcatgtctctccgtaaaaccctaaccgccgtgaatcaatcttcgttaccgccggattctttaatctccgccggtaatctcactgtttcagaggtctctggttcatcttctagaatcagatttcgtcctcgtaaaatcaggaaagtttcgtcagatccgtcgccgaggatcattatcaccgcgtctcctcctctatcaacaaaatcgactgttgatatcgctctacgtcacttacaaagctccgatgaacttctcggagcattaatcacaacgcacaacgatcctccactgttcgactcaagtaatactccgtttctctccttagcgagatcaatcctataccaacaactcgcgacgaaagcagcgaaatgtatctacgatcgattcatctctctattcaacggtggagaagcaggtgttgttcctgaatctgtgatctcactctccgccgttgatcttcgtaagatcggtgtctccgggagaaaagctagttacctccacgatctagctgataaatacaacaacggtgtgctttctgatgaattgattctgaaaatgagtgatgaagagttgattgataggttaactttggttaaaggaattggagtgtggactgttcatatgtttatgatcttctcgttgcatagacctgatgtgttgcctgtgggagatcttggtgtgaggaaaggtgtgaaagatctttatggtttgaaaaatcttccaggtccattgcaaatggagcagctttgtgagaaatggcgtccttataggtctgttggttcatggtacatgtggagactaatcgagtctcgtaagaccaaatagcacctgcctggtaatagtttaacaatacctctctttttaggttgatagtaactagaattgttatgttacatagacaaacttgattctttatagaatatttcatgcttgacttggaaatttgaacagttacatgattagaaaggataggagtataacatttgtttgacattaagttctctggattggtttttgtttggaatgctttctagaagtagaaatctcccaaatcttaaaacaagaatcataaagtatttatcttttcttgatgtatcttgtttatctagcaatagtatcaatcctagtaagtaacatgacgatactttatcactgaagcttctatatctggtagttatcgttgaagtgtgatttgttgcaatcaatcatttcagtaatcgggcagttaatatgatcctgtgacgaagaagcttttccatgcccatcacttcctttccaagtttcacttgctggtaatctgagttattttgtgtctgtaaattatggagcacgtaagaaaaatccttcttgtattttaactgtattccacggattatatttctgtgactgttgtaaacatgtatcatgtatggggtttcatttgacttggatattgagaagcatggcttatttaccaagtcttttgtttctgtcttgtactgggcttggcccaatgtctcatccggcccaattgatcaagtggtagatagcttggatctgattttgccaagacagatgtgaaatcaacccttgctttcttttaacttaaaatagttataggaagaaattactcttattcagagagacgaatttaaaagtctaagatgtcacgcgtaacattcaaacctcttaataaaagtttagtatatggctaatctattcccgttgattgatttcaatatttggtaagaaatgaagatgatcataaaagtgctacacagctgtgggaaacaaagaatctgaaaaatgagacatgaggcatgtggagataaataaaagtgcaggttttgttgtgcttatgtggaccagcttttcattctttcacacttttaattcttcaaccctccccaccagaaaaataatttatcatgtcttctctttcaagactatcattaaactctgattgttaaagcttatttcattaaacaactctattagaaaccctaattccatttgtatgggaaattgaagctatagtagttaacttctaactccatgcaaaccataaatacctctcataatgatagtaagagtattattttctcattgattatcacaataaatctgatcaaagaatttgtggagatcgataaataaagatactcctactattattatgacagcataaaggattgacaaacattgttgttcgaagttttaatctattttatgatatgttagaacttaaaatcatagtcctaaaaatttataactaacaatacataagacataattttaacttacattagaaaaaagttttgaaaactaacccatttaactaatttaaaataatcccataactttcctctcatttatctctctctctccactcctcaagtctgtacttagtaggtaatagtttgactaagctaggtttttttgcagacatacattaattagtaacaccatcaataatcatcataaaagaaaatagagagaaagagagataaatgcaataatgggagatggaccaaaggtgcaggtggtgaaagataacaaacatatgacaatgtctcgaaattaagaggcaccaccacacatacacacacactctctctctctagtaggtttgtgtttttaaaatcaatatttttgttggattctcatgtgaaataaaacttgatgggtgataggaaacaaacacacatacgtcatcatcatccttaatttctatttctccttcttcttcatcatcaatatcaatctcatcttccactactcctcccctctaacaataagcagcatctctataatccctaaggtgagtccaaaagtcgtctattaattattaaaggagagatttttgcatgcattattgaatgatttataagtattaatatttaacaaagttttgttgttttgggtcagattcacaatggagcttggaggaaaatgcaatgcaattacaaccacaacaatgatctcaacagaagtaaagccacatacggatccggaaccagaagccaaacccgaatcagatccatccatggctttattcccgatcaagaaagaaaaccaaaaaccaaagacacgtgtcgaccaaggagctaagtaccgggaatgtcagaagaaccacgcggcctcaaccggaggacacgtggtggacggatgctgcgagttcatggccggcggagaagaaggtacactcggtgctttaaaatgcgccgcctgtaactgtcaccggagcttccaccggaaagaagtgtacggacacaggaacagtaaacaagatcatcagctgatgataactccggcgttttacagcagtaacagctcgtacaagccacgtgtaatgcatccaacgggtgagattggacggaggacttcatcttcaagcgaggatatgaagaagattctgagtcatcgtaaccaaaacgttgatgggaaaagtttgatgatgatgatgatgaggaagaagaagagagtgaggacaaagatcaatgaagaacaaaaggagaagatgaaggaatttgcagagagattagggtggaggatgcagaagaaagatgaagaagagattgataagttttgtaggatggtgaatctgaggagacaagtttttaaggtttggatgcataataacaagcaagcaatgaagagaaacaatagtaacattagtgaatagtttgatgatctgataaaagtgaaataaatttttacaatcctgttttgcttttatatataatttttgcccttcaaattattcaaaatcttgagtataaatctgtggaatcttgtatgttttgattgttttatattgtatctgggattatttttttcttttacttaatttgtggttgaacaaagtgataaaattggaccttcaaataaagagggaaaaacgtgtgtaattaataatttaatgcacaagtatggttagtacaattagctggaatagctcagttggttagagcgtgtggctgttaaccacaaggtcggaggttcgacccctccttctagcgttttttatccttcaaatggctgttttaaaattctgattcatacttttttttttctgtctgaatagaaagttgattttgtttgaaaaatctgattcataatcatgtacatgcatgataacagtctgatgttaaaccatcgtaaggagcagatttagcattctagaatagatctattctgcttacttttaccccaaatttagatttttccatgattaatatattgttagatatggatcagacaaagaagattagtctaaactctaaagccattgtccatttgatttgtctaaaagatgtagacgtaatagtcagcataaacacacatttgaccggcgatttaatagggacgaacaagaagatgtatacatcatgtgggtgtaacactaacacatgctttattaattacatatacaaaaatttaatttagttagttggagatctcatacacacaacaataattaaaataaaagtcaaacagatctactattttccttttcatatcacaaagcaaacttgtcctactacttaaatcaacaccatcacgaagaaagtttcaagaactcacctaaaacacaaacaaaggaactccactttttttccacaccacatcacaccatgtttagagccatgagcacaaggaaaatccatggtggctacgaaaagctcggcgatgaagaagcgagactgaagagggtctctagcgttccggctagtgtttatggtcattcaagaaacccggttcaagaagtgaagaagacaccgacagcgaaaccaaccggtggttctgttcatcctttgtttagtttctttgacgttcattttcaaagaaagaagaagaatacggcgaagaagaagagtttagcaacggcgaaaccagagtttgctaggtatatggagtatgtgagagaaggaggtgtgtgggatccgagttctaacgcaccagtgattcattacagatagattcgtcaaggaaaatgaataaaagatttgtatatcgtcttttttttccaaatatataatctatgagaaagccaaacaatccttgattcgattcgaaaagatgcatcaaacaatgtattagtcatttttgcacgaattgatgagtgttttgtacactctcatggagattccgtgaagaataagataagttcaagggtcttgactttaatatatgatcaaaaagttgattttggttttcttatttaaaaggatatgttatatgaactgaatcaattcgtagtagttgctaatatagaagcggtcccagagctgatatctttgaatcatgttctatattcttcatttcccaccttagcttttattttaagaattcaaaatcaagtgagaacaaattcaaaataaagtgaagaaaaattcaaaatttccagtaacagatgcatatttgattttcccttttcatcaaaaaataaagttacgaataaaatattattatattaaggagaaaaaaatagatatgatcatagtctcatatttcttgtgaagaccagtttttttttaaaactatattgttaaccaagtttgaatactcgctctttattaaaagcgtgttcacatgggtcacgtaacacgtttaagaaaaacctggctctaaaaatattatcaaaatcccagatttgacgaagacaagaaaataaaaaaagacttttaaaatcgttttcaaaatgggctttacagattcgtgaacagacaaaaattgggccatgggttaatttgctttttaggccacgtcaccgttttagtgacgtttctgaatattcgagatgtgaccccacttaaacaagatcccttggacgacgtcgtttcgaccacttcacgaaaccctaccgtcgatttatttacacaaagtaccccttcattgtatagcgccgtcctttgctgtaactcttaccgtcaaaggttatatccgtctttccaaatgtctcccaaagacacgttttaaaaaaataaaaataaaacgaagaaaatcagaaaatgggtcgccaagaatagaggaagaagcaaagaagaagaaaaaaaaaaaacagagcgtttcaaatatttgcggagatacaaagctgagaagagataaaaaaagccttggagaagaggttttcttcttcttcttcttcttcttcttcttcttccctcctctcctcttaacgatgtcgtatcacgcttcttcttatcttctccgccgtcgtcttacttccgtataacctcgatctctcaccgttgaatcttcctcagctttcttccgtggagatctccttcgcgctcgaggtaaatccttctcttacgcctccggatttgatgttttcacctttctctgtttgttgtttcggtgaaatttctggaaattttcgttatggtaggtctgaatctcgagagattcgattcattttcatcggcttgacctattgttagcttctagattatcagatttgtgatttgattttgctagcttctttttttcgtgcgagaattgaatcaagttttgtttaggtataccgatgattgtggtttgagcacgcggtgtttgctttgtaccttcccaatagctaattctcacttatgcgaatgaccattgttggttgatttctgattcgattgaaatgaagaaacgctctttgtggtttcggtttttttttattactaatttgatacttgaatgattgcagagccatgcctactttttctgctattgctttggatagaatgctagagccaggggcttccacgtctgtcgagagtgttccaagcacaactaatttgttttattcaaagccaccgatatcaaaactggagaaaggtaaaggtaaattacctaatgagaggacagttactcgtcctctgatgtcacctgctctctacgccacacctgatgcgattccgcttcctaattcgccatcgtctttcccaccgtcgccttatatcatcaaccacaaatcacgtggacctccacgtcttcttaaaagctcttctgaggctaatgttgtgtcttcttcccaccagaagacgctggaagaggaaactattactgctgaaacagatgtaaaggtttcccctcggaggaggtccacttccttctcgtttcctatcactgaggttactgaagatgattattccaatggagttcatgctcgtacggttggaaactataattttgatggtattgttgatggtcctgttggaaattggagtccgcttgatgggaaaagtgggaatgggaagtcagagttggataacgctgctaatggtttagaacgggtaaatggtctgtctgagccagtccctattaaaacagacaaggagagtgagtcagaagatttctatgacccaggtgaatcagcaagcttcacaagtaacacagacgtagagggtgatgctggggacgaaagttcacaaagacttgccacacctgtgggagagttttatgatgcttgggatggtacttatctaaatcttattctcttactaatcatttccttatgagatggctgtcaatgcttatgatcttaacgttcccaggataatatgattagtcacattttagagtcccttctttttaacctttgagcatttgagggtattctttctttaatatgcagtagtagcgccttgtcatgctttggaattttgttttcttctggatatattgaaatttgaaagtgatgagttatctttccaaatcatgatgattaatgcattattcatttcccttgatgagtatctgcaaagtatcctgaaagttaagctttaactcgactctatgattcggaactatttagtattttgtaatccatctaatttcttggtttttcagaactatcaaccgacagtggaatgcagagttcagttaataacatcgaatctgaattaagtgagataaggctgagtttactaatggaaatcgagaagagaaaacagacagaggaggctttggagcagatgcaaattcactggcagagactccgtgagcagatggctcaggtgggtctgttcgttcctattgatcctaccgcctccaccaacaacatgaatctatcagaagaactacgctgtcaactcgagattgcgaggtttgtctctgactctttaggcagaggtatggcaaaggccgaggtagagatggagatggaatctatgctcgaaactaagaactttgaaatcacacggttgtctgaccgtctacactactacgaggccgtgaacagagagatgtctcaacgaaaccaagaagccataggtagtagaaaatcactctcattcaccaaatttatccattgtcattttctatcgtataataaaaatctaatctcacaactctgttgataccagaggtggcacgacgagagaggcagaagagaaagaagaggcagagatggatttggggatcaattgcagcaaccattactctaggaagcgcggcattggcatggtcttacattcctgcagccaaaccatcatctgaagtatctcttaaggatgaatgattaagtaagtctcttgtatacgtagtgggtttgatgcaagcaagagaaataaagatacaggacgtttagcgtacgccttgtgaatagaaatatatacatatttggttattgttttaactgttctcaagaggatgtatagctccgagtagctgcaaacacatttttcttgcggtggcatactgatgagtggcagccacagtcactaatatttggttcggtttggttcttattaacattcaatgttagctctagtgtaaggtgcttgccttgcttacatcttaaagaaaccttattttttaaaatcttgattttaacaaacgggctctgaatccttcatttcgatattttgaaaagaatttgagggataacaattttaagctttataagtaaagcttggtattgcttatctctcgtctttgaaccagttaagtacaacgtacgctgcgaaagctagcgcaaatgtagctgcaaacagaaatacagatatttgcactaatagagatgcctcgaaggcttcacgaagaagcgaattccacattgtgtaccataagatgcagaaaagagaaccaacaatggcacccaccaccacttgactgcttgtgtgcagtttttgagaaacccttaaccgtatctgtgatagtgcagagagtgtgagatcaatggcaactaaatgatttcatatatgaatgaaaagcttgaatcaattaggtgaaacttgttataacagacttacaaagtatgaacccaatgcgaggattaagccgctaagaaacaaagacacaccgttggttccaagccattccataactgcagaaaacacgactcgagtgaatccgttgtaaacagttccacgatagcgaacgatgagtagtgaacagcttaagctgcttaccggataaaacagcaaagacagatatgaaagaaatggattgagcatgagaagatggcatcccgggatcagatcgcaatgttgtagtaggcctctcttggttaagtatacgtttaagaactacagagagagcagaattcgaaatcgatccaatgactgcccacaaggctgcaccatcatgtcgcaaaagaatgattgaaccaaatagaacagacacaacccatttgctctgtcatcattaattaaaaccggtcagaaagaaacacacattgatactgaagaaacatttcatcgaacacattgcgtgcatgaatgagatttccattaactaaccagacgattaacaatggcttcaatcccaccgccggtgaccaagtctttccgtatctccgatgagttgttgatgaaagattcttgctccaacgctccaaattgttcgttaccgtcattgctcctgcttccgactctgctagagaatcttttaacggtcatagatccaaagctagagacaaacaaaggagacccacgagagataatcgaactatagctcgaaagtctcgatcttttaaggtacgaggaagagtcaaagtagaaattgcaggtgggacagtgaagaagaagaagaagagaagacgacgctgccatttccaaaaggaagataaaagtcaacgtagtatcaaatccatcgctaaaggaagtaaaattcgtaagacgaagaagggaaatatgcaaatcgaagaaatcaatgtctggttgagaacaagaacctgagagagagctttcttcttcaaatcaatcttcaaagtttttttgctcgaaaacgagtttgttatttgttgtttaccttgacgcattttataatatcgtgaccactcatattcttccacgtggcatgtagaataaacgggtaaaccaatattgaagcaaattaatgggcttttgtttcctcagctgaggcccatatattaattaaaaccattcttagtttgatgtagcatcaggtgatctggagtggcttcatgagatatatgtctatgggcttagttttgtagctcttttcatttagcttttgtacaaatcctcattagtttgtgcccaaaaaaaaaaaaaaaaaaaaaagtacaaatcctcattagtttaaaaggcatatggttgccgagaggattttttgttttgttttatgcttctcttgtaaaatgttgacatgaaaaggtgaagaaatatttacctgatgttatagaaaagttggaatattgttggaatatcacatatttttaaaaacttatttcatattttttgtatcattgtgtatattacaattaacacatttgattagtttgtttaattaatctttttcattaaaacataattaacgaaaattatattaatctacattattaaaaagaaaaaaaagttatcaagaggaacttttcggtttcttttcatgttattatttcacaacaaatttacatattaccgctaagttataatgtttcacggtctttacggatgagttataatgttttacggaggaattaaatattgcttcaataatagatcaacggtgacaatgtcgtgtacacgtcgatttattcggaagaatatttaaatgtttcactttcagcgttttagaacaatgttgctttatgtgggcatacatatataaattaaatatggaggtctaaattctttgttaccgttttgtgtaaagaatcatatcaattttttaagctaaactagatctatcggagttttctttttttatatacaatttgggagatctattagagttatgtgtaaaatattcatatttatcctcgattgtggcgataaatacagatatacggtcgcaaggtatggaaactaccgtggtcacatcaaagatttgcattagccaagttttttttggttctttctcgtaattccaaaaaataaaaaatactttaggacatggaaagaaagaaagaacgacaaaaaaaaaaaaaaaaactttagaacatggaaagaaagaaatttagtatacaatgggcagagtgacgattgacgcataccatggcatggcttatcataggagatgaaaactgtgtgtcgtttttggaagtaaaatatatttaatcaagagcaagatgcgttcatcacactgtcaaactcaatcttccaagtacagtattggcagacattgatgatgacctaaagatttttttttcagaaaatagaaagaattaagctatcaattttaaaaccgattacgatgtttttgcaccttattaaatggggagtcgccaattataggagctactagtttgcgtagaagtttatctccactctatatagaagtcgaaacttttttcaggggcgatgaagtgtatgaatgatgccgacatttaagaagtaacattttttacagattgtttagatttggtaaatatgatgtctttctcaactgaatgtccaacatttataagaaatttatacattataaacatttaaactttataccacggataaaatcttagaattgatggatttgtattgatattaatacatgattgtgtgctataggtgaaattaacaaaatcaaataaaaatatacaatcttaaacactaaacaaaattttgccaaaaaaaaaaaaaaaaaaaaaactaaacaaaataaacaatataaaaaaaaatacaacttaaaatttgaaattcttatttaataaatatcgtctcgcagtggtaaaccgcggattaatatctagtagttactattttgtttattaagacttagcaataaaaggtacatatgcagttattatatcgatcattaattgaagttatattctgactcctattatcatggcaaacacatttaaatggtttaggttttttggttgattttgaaaggcaatcgtcgtttcctgcatggccgcaaaattcgcgatagtatttctccgaggttctacagatccggttgcgagcttccacatctaatattttatatcaaccaaagaaaaatgcagattaaaaaatttgtccacaaaaaacaattgttagttaaccttttgaagtataatcaatacattaaaatttttatgagaaaccaatacaaaataaataaaaatctttcttttattttttaccgtgaatgtgactgaaaacaaatattgatatgaatatataagaaatcatgaacaaggtaaaatacttcataattgttgtaacaattcagtttttcccttttgttgtcaacattcatacttcctctgttcctaattaagtgtagtttaaaggtttttcatttttttcaatataagtgttattttcatttttctatgcaaacattaaatgtatttaatagtttttaaccaattatattttacatcatatttttttattggttggattagttgtaattaatgatgtttttataagaaagagataaattaaatgagatttatatgttttcttaatttgtgtgcaaaaaccttaaagtacaaatatttagaaacagagggagtaataaatataagcgaactccctaaatttaactatatccacacaaaaattagaataaaaagaaaggctaaaaccaattgaacaacaaaattagtcatttatttttagaaattcttacaaaaattccttttttttaatgataattatgaatattcaagttcttaattgaccaaatcaaaatgaatacaaagaaatgaattgagcaaaaaaaattgtgtggctaaacgaagaaatgaattcgagagactaaaatattgaaaaccactctcgccttctctttttattggagatggcttgcgcaatctcactcaaactcgattcgaatcaatattaaacttattaaacacgtgagaaagcccatgaaactcgatctaatatatcatcaccgacatacaagaaaaagggaaaatcgtcaactgaactacaagaaaaaaaggaaacttgtctaacttacggacaaaaaaagcaatcaaagtaaaaaaacaaagtatgcatataaatagaagagcaattctgaaaaccggacacaaaaactcacacacgaaacctaagagattgattgttacaaactctcacttatatttattagttcgtatatattctgttttagtaagatagtcgatcgggatcacatatacctatataatttaagttatgaccggtacgtatgtagttttttacaaaggcacatcagtaaaataaataaaagcacaattcgtctatctggatgaccttatatatatttatatctatacatatctacatatataaggtcatacataacatatggtttttgtagtttttttcttaaatgaatttttgttagctcttacttttatgtataaaaaatatttatacttttatgtatcatttgtttgcgggagttttatgactggtaaaccagcgggtgcgatagtaattaaataaaaataaccaaaataaatgtaatatattactattaaaagaaataaaaatataaaatattatgataaattgagaatattagaaaaaatgattttctgaccaaacaaaaatacaatatatcatctcgtccggccaaatgattttctaatcgagaaaacaaatcgaaaaatgtattcaatatataatcaaaaaactcaaaagaatacaaaataaaataaaaacaacgatgccatgaaatagtcaaagaattacactagctaatgaatgaataaaaggatagatgatacttatgtttgattcttgattttgatttttatcggatgccataattgagagaatagggttacaatatattaattagggttttctaataaaaataagatatataaaagattagattattttaattatagtgattagggtttgggtggaagccacaattattttaattaattaaaaaaagattttttttttaacctaaccgctaccgcccgcaaccgcaaacgcttgcgggaaggagcttttgaaaactggcgatttcgagcggtttaaagcgatatctagcggtttctatgattgatgttaatcgctaacaaccgctaccaaccgcaaacgctgcgtttgcgggtggtagagggagaaccaatcaagacctaactctctcccacaacttgacacatcagcacatgagagcttgccacctagacttcataaaataagtaatacataattagtaattaattcaacataacaactaaaataggagaatataattaatgaaaacttgaaccatcactctttctacattttttaattcaatatatcctctttaattttgagatccacttaagtggttaaagtggtgataaaatccaaacatgttacacatattcctggcctaaaaattaaaaattagacgattattatgaaaaaaactaaatgaatatgcagattgaatatatctaagcttttcgagatttatgttaagaaaacaagtaattagaaagatatttgaggagctatccttataactaatacgtaagatataagattatgacaaaaacttaactaaactttccaagaacataaaattgaatatgcttagattgaatatgaagagacatgattaataaagacaagttatatttttagtgtaagaaataaattttctaaaatttcaccgtctcacaatctatacatataactaaaaaagcaaggacatataaattcaaaaaaaaaactgagaatctaaaacaacaataaaaaacaactcaagcacattcgtttttcagatgaactaatacagttgggtttttctaaaacaattacaaatcatatttatgtttcaaaacctatgcattcaactttactttatatgaacagacattatataaaacaatttgtaaatagtaatacgtaaacaaatgtagcgtttcttggatgagggaaaatgttgaaaaaattgaaagtattaaaaataatttgggccctgagccactttttttaaaagtaccagtcttattctatacattgaaaaaaacaaaacttagaatttgggccttatttagaaaccgggcctgaattgtttcttaattgttgaatcaaataaattaacttgatacatgttttatgatcgatcggtagataaaacacaaagttcattgctaaattgggagaaaagaaattgcattatcaagggtgttgttcaaggattatcctatctgcatacttacgcagcagatagttattggtaagagaaatgtcgagcttgaaaacaaaatatatatatatatatatatatatgtatgaaatagtatctaggatcttaaattagaaaatcatgtaacatcagtgagtgttgttctttccacggaagaagcagatattgatgcatgagatatatcctaaagatgtccaaaaggttttaggccacttttcatccattctcagtaggtaactctgtttaggccacttgactcagattagtgatcccaaggtactagtttctgaatttgtttgaacaaccaattgtctttagaaagacataaactcttgttccaataaagagcctataccaactctagctattcaatgacactattttagggtttagcatttttgcattattgtccaatgatacaaaagagagagatggatatatgaatgtcctctctatcttgacgcaagcacacaacagctgaaatatcatatagacaaggacgttttaagaatctggtggaattgatttgatagtagtatacaattgtgatgtatatatacatacaaatattaactgttcttggatttattgaaaggaaatgactttaaattacaagaagcgtgacccacacgttaagtcagtctttctttactaatattcttttcgattagtcaaataaacctcatgaacaagtcattggagcccacttaaactctacttttctattcttcttctttctttttgttattctatatattagttagcaacttccacgttgtagcgatggaaggatccaagctacttccttgcgtccataagtctccggttcccacctcccaccaattatatataaattatgagattttgggtttaacaaaactcaaaaaacacaaatacacccaaaacaagatgagctcctctgactcttcttccgccgaatcccgtctagccacggctaagacggttctcaccaccgcggcttcggtggctgcgaccgcaatgctagctcgatctttagtccaagattatttgcctgacgaggtgcatcactacatttcctatggattccgttccatctttggttacttctcatcccaaatgacgataatcatcgaagaatttgaaggttttgctcacaatgaagtctttgaagctgcagaggcctatctagccaccaagatctctccttctaacaaaagaatcaaagtgagtaaacatgagaaagaaaacaactacaatgtcaccgtggagcgtgacgaagaagttgttgacacctacaatggcgtcaaattccagtggatcctccattgtcgtcatgtcgagtccaagcacttccacaacccacgggatctaaactccacactgagatctgaggtccgatcattcgaactcaacttccacaagaaattcaaagacgtagctcttgaatcttacttgccattcatggtgaaaagagccacgttgatgaagcaagagaagaaaacactcaagatcttcactctctccccagaaaacatgtatgggaactactctgacgcgtggacctctgttactcttgaccatccttctaccttcaaaactctagcaatggattcagatgtcaagacaagtgtgatggaagatctagacaaattcgtaaagcgaagagacttctataaaagggttggtaaagcttggaagagaggttacttgctgtacggtccaccaggcacagggaagtcaagcttgatcgcagccatggccaatcatctcaactttgatatatacgacctagagttgaccgcggttaacaacaattctgagctccggcgattattgattgccactgctaatcgttcgattcttatcgtagaagatatcgattgttcactagaattgaaagataggactagcgatgaacctcctcgggaatctgacgatatagaagatccacggtataaaaaagtgacactctctggactgttgaatttcatagatggtctatggtcaagctgcggtgacgaaaggatcataatcttcacaaccaattacaaagagaaactcgacgcggccttgctgagaccaggacgtatggatatgcacatccacatgtcgtattgcacaccaagtactttcaaagctcttgctttgaactatcttgagatcaaagagcaccgccttttcagcaagatcgaggaaggtattgaggcgacagaggtcactccagcagaagtagctgaacagcttatgagaaatgactctgtagacaaggttcttgagggtttgattgagttcttgaaagtcaagaagatcgaaaacgaacaagataaggccaaaacagagaagcaagagttggagaacaagaaaaagaccaaggagggaacagattccgtagtcaagaaagaggttgatgaacagctagtgaggaatgaccgtgttgataaggttcttgagggtttggtcgagttgttaaaagccaagaagatcgaggacgaccaagataaagccaaacatgaggaggttgaacaacattaacttgtgagatatcaatacctaaatcattaaatcgccagttactgtctataatctacagattcatttataaacctagtcctaagataaaataatcttagagagattgagaccaaaaaagggaaaaaattgaggagatcagataaaacacctctgcatccgagtggtagctgtaaagagaagagcacgtgtatttatacaaaactatgcgtttagcttgttttttctctctgttttttttctaactttttttagcacaatttgttttaagctactaaaaaaaaagtttgccgacaaaaaaaaaaaggttaaattttaactttccgaatcttaatttatgacagttgatttttttttatctcaccgataaaataatatcttcaagccacatttgtgaaattgaaaatctcaatgattccgacaaaaaagaaaatctcaatgattccttccttgtatcgagaaaaggaattgacactaattaagtgggccaaaattttggcaccactacacaattcgtttagtcaatactattattaaatgggccgtacatgttttaattttcttcctttctttgtagatgtataattgatcttcttccttttcctcaatttctatttttccttaaaattgggcttttaaatgtcatttccttttcgagttatttcctttttcgtgtttatatttatttttgtctttgactcctaatcctagatgctttttttttttcgtcagtcctagatgctttacaaataaataaagaaaaatatttgaatgaactttatattaacttcttttattttacctaattaaaatcggacacctaataacaataatagaaagttaattataaaatctaatttgccactaaaacaaaattatgtatcggtttgggtttattagaaaaaattagggtttagattttatgattaaacgaggttaaatatcagtttgggtttagaaagtacgattagagtttagattttctgattaaatgggttaaatattggtttagttttataaacagatttagattttacaattaaacgaggttaaatgtcggtttgggtttagaaaatacgattaaagtttagttttcttacgattaaatgagtttaaatagcggtttggatttataaaggaaaattagagtttagattttgtaattaaacgagattttatatcggtttggattataattatagctttaatttattatgtaatttaaataggatttataacatatttttattggttaatgcaaaaaaaggtgaataaaagagaagaaaacgcccaagctcttcactctcgacacagattactggtactcatcagacccatggacctctgttactcttaaccatccttctaccttcaagacgctagcttagaagaaatatcgttttgcatgtttttctctttagttttgttttatcgaacgagattttttctaccataatttttttatatagcataattatactttgaaaattattataactaaaccttggtattagtctaatatcttacattagttcctccggttcataaaaaaatattttctagattttgtttcataatgttttattttttagattctatattagttaatatcattaagtcaaatgagagatatttgaattactattgggtaagcactatagtaatttaaacacaagcatagttaaatcaacaaagaaaaaaatcaaacaaaggatgcagaaacatatatgaacttgaaaaaacccaattattagatattttgtaaagaatcatcaaaaataaaacaatcttcttagaaatattttccaaaatgttgtctcgaagaacatctattaaaattggaacgatacataaaagattagtatagtccgcataagacacgcataaatcgaaatataatccaaattattttcaacaaagaaaaaattacttttcaagaaagtaaatattttgctaacatgtcattctaacattaaaactactattacaattttcaagtataaaagacaagtcagcatatatgttaaggagcaaagactttgcatttttgcagcgagccagcgaccagactctagaagtctgtaggggctatcaagttttcatttttaacgatactttatcaaatgggccgtaatcttggcccactatagaccattcatttagtgttccatcaccatttaaatagtaatctttcattccctaattatctcaatcttatgatcagaggtattcgtgaaaatttattattgatcgcagaagcctttcatcaaataaaagagaagaactggtatcaaattttctccttaaccttaacatttttttttttttacttgttaagattccaatttgtgtgctcatcgtaaaattatcaaaagaatagcatcgtttgtttaacctaatcagatttatccccacgtaacctagtaacaaatacagtactattgttctataatcagatttttttttggattagtttcttgtctctttgatttatgagaaccgacttgaatgtatttattttatttttgatgattgaaggagatgagttcctctagtgaatctcatctagccaccgccaaaacagctctcacagcggttgcatcagttgctgcagccgcaatactagctcgatcagtggttcaagattacatgccaaacgaggttcatgaatatatctctcacggctttcgcagattcttcagctacttctcttatcagatgacagctgtaatagaagaatttggaggttttgaacacaaccaagtgtttgaagctgcagaggcttatctctccaccaagatatctaattccactagaagaatcaaagttaacaaacttgagaaacagagcaattatagtgttactgttgaacgtgatgaggaagttgttgatatttttgatggcgtcaagcttagttggatccttgtatgtcgccatgtcgataaaaaggattttcgtaacccgagagatctcaactccactttgaaatcagaagtgcgtagttacgagcttagtttccgaaagaagttcaagaacatggttcttgaatcttatttaccgtttgttgtggaacaagctgcttctattaaacaaaagtttaaaacattgaagatcttcaccgttgattcttactccgtggagtggacctctgtgactctagatcatccttccacgtttcgcactctcgctctggatcccgaggtgaagaaaaacttggtggaggatcttgatcgattcgtgcagcggaaaggcttttacgggagagttggaaaagcttggaagagaggttatttgttgtatggtcctcccggtactggaaaatcaagcttgatcgcagctatagctaatcatcttaacttcgatatctatgacttagacttgacatcacttaacaacaatgctgagctacggaggttacttatgtctactgcaaatcgttccattctagttgtggaagatatagattgttcaatcgagttaaaagatcggtctactgatcaagaaaacaacgatccgttacataaaacggtgatgcattttgattcactatcagttatgttgttatgtgatcttttgcttattagcattactaatgttttggttagtcattttcaggtcacactctctggtctattgaattttgtagacggactatggtcaagttgtggtaacgagcggattatagtgtttacgactaactacagagaaaaattggatccagcattgttgaggccaggacgtatggacatgcacattcacatgtcgtattgcacaccagctgcttttaaggttttggcttcgaattatctcgagattcaagatcatatacttttcgagcagattgaagaatttatccgagaaattgaagttacaccagcagaagtagctgaacaactgatgaggagtgactctgtggataaagtactccaaggacttgttgagttcttaaaagccaagaagcaaatagataattcaaaagcttagaagaaatttagttcttttatttgtttctttgttaaacactatcatgcaattattggttataaaatgttacagaaagtgaaatcatttttttttttcctaagtgaaatgcggatattgttttatgaggtcagaacatgtctaaactcaatgataagattctaaagtagattgagacaagtttcgtagtcggcagcagtaaccaagaaaacgagtaaggttgactcttgacttgttaaaccattgacttcaatttcgataaagtctctatgtaagctcatttttctgaaacaagttttgctaaaaaaatccaaagatctgaagcttcagatccttctcggctaaggctaagtcacaaccttgtaagtttactttactttggttagatttgtttcaatgttctaggattctacatgtttcttgagaagatatggattagttaaagaataatccaatcttttggttattgagattctatagtcgttggttgattgatttttggaaagttcaatctagtgatgatacacataaccgattgaattattgcttggttatagtttaccaattagagatatttcttgaagttgcagggtctgagtaaatggtggacgctgttgtaacagtgtttttagagaaaaccttgaacatcctcgaagaaaaaggccgaaccgtatcggactaccgaaaacagttggaagatttgcaaagcgaattgaaatatatgcagtcttttctcaaggatgcagagaggcagaagagaactaatgaaacgttgcgtactcttgttgcggatttacgagaactggtttacgaagctgaggatatacttgtggattgtcagctcgcggatggtgatgatgggaacgagcaaaggtcatcaaatgcgtggctttcgcggcttcatcctgcccgggttccgttgcagtacaagaaaagcaaacgtttgcaagagatcaatgagaggataacgaaaataaagagtcaagtagagccttatttcgaattcataacgccgagtaatgttggaagagataatggaactgatcggtggagctctccggtgtatgatcatactcaggtggttggtttggaaggagataaaagaaaaatcaaggagtggctctttcgatcaaacgacagccagcttttgataatggcctttgttgggatgggagggctaggtaaaactacaatcgctcaagaagtgttcaatgacaaagagatcgaacatcgtttcgaaagaaggatatgggtgtctgtgtcccagacttttactgaagaacagatcatgagaagcatattgaggaacttgggggacgcgagtgttggagatgatattggaacattgctgagaaaaatccagcagtatcttttggggaaaaggtacttgatagttatggacgatgtatgggacaagaatttgagctggtgggacaagatctaccaaggactgcctagaggacaaggaggtagcgttatcgtgaccacaaggtcggaatctgtagcgaaaagggtgcaagcgagagacgacaagactcaccgtccagagctccttagtcctgataacagttggctgctgttttgtaatgtggcatttgcagcaaatgacggtacttgtgagcgtcccgagctagaggatgttggcaaggagattgtaacgaaatgcaaaggtttgcctttgacaatcaaagcggttggtgggttacttctgtgcaaagaccatgtctatcatgaatggagacgaattgcagagcattttcaggatgagctaagaggaaacacttctgaaactgacaatgttatgtcttctctgcagttgagctacgatgaactcccttcccaccttaagtcgtgcattctcacgctttcgctctatccagaagactgtgttataccaaaacaacaactagtacatggatggatcggagaaggttttgtcatgtggagaaacggaagatctgcaactgaatctggagaagactgcttttccgggctcacaaacaggtgtctaatagaagttgtagacaaaacctatagcggaaccatcatcacttgcaagattcatgacatggttcgtgatttggtgatcgatatagccaagaaggattcgttctctaacccggaaggcctcaactgtcgtcaccttgggattagtggaaactttgatgagaagcagatcaaagttaaccataagctgagaggcgtagtgtcaacaactaagacaggtgaagtgaacaagctcaactcagacttagctaagaaattcacagactgcaaatatcttcgggttctcgatatctcgaaatccatatttgatgctcctctgtctgagattttggatgagattgcaagccttcaacacttagcatgtcttagtttgagcaacacacatccgttgatccagtttcctcgttccatggaagatctccacaaccttcagattctagacgcaagctactgtcagaatctgaaacaacttcaaccttgcatcgtcttgttcaagaaactccttgtacttgacatgacgaactgtggatcccttgaatgcttccccaagggtatcggaagtctcgtgaagctcgaagttctgttgggatttaagccagccaggtccaacaatgggtgcaagctcagtgaagtgaaaaatctcacaaaccttcggaaacttggtctttctctgactcgtggcgatcagatagaagaggaggagcttgattctttgataaacctaagcaagctgatgtccatttcgatcaactgctatgatagctacggcgatgatctcataaccaaaatagacgcccttactcctccacaccagctccatgagctttctctacaattctatcctggaaagtcgagtccatcgtggttgagtcctcacaagcttccgatgttgaggtacatgtcaatatgttcaggtaatttggtgaaaatgcaggaaccattctggggaaacgagaatactcactggagaattgaaggtttaatgttaagttcattgtcggacctagacatggactgggaagtgctgcaacagtcaatgccgtacctgaggaccgtgaccgcaaactggtgtccagagctagagtctttcgcgattgaagatgttggctttagaggcggagtgtggatgaaaacaccattgcacagaacctgatgaaacgttttaagcaactagatcaatgtttattaaacagtgacaataagttggtgtattacatataccttgatacaatgtaatgttgctttgaccgtttggatttcatatcgcaattttcttttctaataatcatataacaaacgagcaaaaagggaaaacagagactagcagcaatggcagatctttgatgtcaactgcttgatcagtcagaatcagagtccagattctctgaagacctaacagacctccgtatgctctcttgatattcggcgtcttcatcatcttcctctttcttcttcttgctgagcattcctgttaaagatttgcactctttaagcaaaaattctctaactgggccgttataataaaaaaaaggtgggaccgaggttcttcataccctttttaagaagaacgttctctagtttattcgttgtgaaatcgtccttggttcccagatcctggaacccaactagcctatccatcgcaactcccttgctaagaatggtaaagaaactcgtactttatgagtatacacctaacaacaaaccctgtatgtaagaaggaatagaaagaggcgaaacctgaaaagcacaacgcaaggcaaagtctttattgcaagcttcgtgacaaagaaaggagcattctgcatttatttcagccaagcattagcttcagcaaaggattgttgaaaagccatttcctcttataaaactttcatcaaatggttcactaacctctgcgtccactttaatgaactttgtgtccacatgtctaggtgcaagagttttcagatgcttgtccataatcctacagtaatgcagtaaatatgtttggttatgagctcatatacatatcagaagacgaacaaaaaataagctgatgagagatcttacttgcaccggtaaaattccttatggtagaaatgacatatcactttctcactcctggtgacttcacccaagaaatctccttcactcacctctcgatattcaccatgcccttgtcttttaaacgattctctcttctcaacctctctctgtcaagataaaatcttgaagattttagttcataccaaaagctgcataactatataggccacaatacaatgccaaagttataacctttagtgctgcaatcctatctgcgtgcaatctttctagctctggatcctacagaacatagacaaataagtctaccatagagacctacgcttaacagtcacaacaagcaacattgcacttacatccataagttcatcaagatcaacctcttcattaacaggatttgatccttgcgccttctcatttgcaagaacttcctacaaaacccatataaagaactcatcaaaaccatacaagtaagtcctcacaggtaatctactcagacaaagaaacatcaaaaaaactcataaagtctatcactatttcaaaaacaaattgagaaacattctttaccttttgataatttcttgcagcagccgccattacatttccaaatgctagattcgagagagtcgatttgactgcatctggatccatcttttaacaccaaaaatctgaaacaacagcatgaaaaaagcattaggattcagagataaatgagagctaaagcttcaaaatcatacctttttcaattccttcctgatgcgaagaagaaaaataaaaaaacacagcttgagaaatcgaaatcaaagcttttttcctttctttactaacaatttcaaaaaatcaaaagatgaacaacaaaggtggaagaaacataccaaacgacatcgttttttagtttagtaaaagatatgcattattgggcctttcatatctaaaggcccacaggcccatataagttaaaattacgtcggtcgctaaccactactacaccgacgtcttacttgccatgtgtgtgtgactcttaatcaattacgaattgaatatattacttttacgatgtcggccaacacgtattgagtaaaatatctatgtgatgatgaattcctatccaaaatgaaatttgcatctctataaaagtatcattcaagagatcattaatcttcatcgatcaaagtcttgaatatttcatctatatatacctaagaaagaaaagagttaaagaagtatattttcgattcaaagaagaaaaatgaattc

SEQ ID NO: 497 - DNA, 123208 bp, Arabidopsis thaliana
gaattcttcttctcttaggatctacgcggcgttttataattggttggagcttaaatacacgagagcagtgaaaagggtacatcgtgtgtatcgtgaatctgcctctaatctgattgtacgcttacgtgtcatgttttgtattgagcaaaaaagcatccgtatggtggaccttgacgtatacgattactatcgtcagattccttgaatgttcctatcctgatgggcttttatgaacacaaagggtttataatttttgtggccttttaagatatatcaagaaaatataagatttaccccagaaattagattgacaatttttaaaccgaaggaaaccaaatttgcttcattgttcattaaccggtatttggtctaattccgaaccgccaatttcttccataacactacaataagagtgcatatatattgcatatggctcatcatcaatattacaaaatgagtttcagtttttaatttaagtttacatcggattagttaataacgagtagtcacagaacgacagcaaaaaataaaggaactatacgttgttccaaggctcgtttttggaggccggttcggttttaaacgtgtgaagcatgtagctacaagcctccactgcttctcctaccgttaagaacatccactctttgcccaaatgatcaccgatgaatttggatctggttaatttcttcacgacctctccttttggatttgacaataccaactgtggattaaaaaagaaagaatattaacaagaagaaacgcgttacatatcctaaaaatgtattatacacgcactacgttacctttaacgctctcctgtcaatgactttcttaatttccaccatcatgctaataccgcttgtgtcgatattaccaacagctgatttgttaaacaaacacgcacagagtaactaagtaagcctccaacgaaaacaacattagctagtgttagaaaaatcaagatcatatgcattacctgacatatcgagtataatatattgtaagctgctctctcctgattgtttaactctctcttcctcttcatcaatccaccttatgattctgtagatttattgaaaagtaaacattattcaaaaccattcttcaatctttggcatgtaaatacgaatgagggttaggttacctttcacgcaagtaactggcattagcaaagtagatgggagcatcaatctccaagatgagaataccaggaacggttcttgatgatgggtactgctcagtgttcctatagatcatgctgtttggtatgtttcccttcaccgcagtttttggcctcgacacaaacagcaacaacctcgctatagatatcgccaccttcatcaccatgaaaaaaaaaaacattttagaatttaataatattgcaagtgttaaaatgccaaacgcaaatagaaggaaaaaaaaaagacagtggcatctaggctcattcagcattataaagtatatactaaccgctacgacgagtccaatctctacactgccgaatacgaccccaacgtaggcgctcatgcagacgaggaagtcgaacttgtcaactttccagagatggatggcagcttgatagtcaatgagtccgagcattgcggatatgatgatggcagagaggacgacgagtggtgtgtagtgaaaaagcggtgtgaggaagaggagtgtgaacataaccgcaatcgccatcactatgttggacattgcggtcttgcaacccgcgttgtagttcactgccgaccttgaaaatggtcctggtatagtatggtacgtcgtaattaatattataagctttttctttcatagttaataaccatatgtgactatgtgtgagtgtgtaggtaccggttgtgaggtaacaagatgtgaaggaaccaacgatgttcatcattccaaacgctatcatctctttgttcccgtctatgttgtagttcttgaacatcgcaaaactcctccccactgctactccttcctacattttacacatgaatttgatttgatttgatgagtttttgttttcacttttcaccattgaaaatcatattcccatattgtgtgttggtgatttaagccttaggtataaagccttagttaatttgttaattacacttggtaataaataagataactatcaaagcctaaataagaaaaagggataatgggcttacagcgagagcaatgatgccagtgatgaggccagttttgacagctgtggacatgtaaggggaagtaaagatgagatcagaaccggagagtggattcaaccctttcttcaggtcccctatctgcacaatcacaatcggtataccttaatttcctttattcgataattcctctccctttcgaacaaaactacaaaaagcccatgagcccacttctttttccacaattcctttactacttcaacttcatgcttcttgttctttttcttaccataatattctacctaactttttcttcttttcttaaaaatatataatgttcttaagattcggtgaaatcatacacgttatctctttggtcttgacttgaaataatttatttatttgattatttatcatcagataaggagattctagaaattgagtaataccacttgaacaccatgtctctcagcgtgagtgaagtaaaccaagagacttccaagaatcactgaggtcaaaggagccatcgccgccacccaaaagaattttggtttcttgatgctctgcatcatcatttcattcattaaacacaattaataacgttttgattgtgtagttatttacattttcagtccaccatatcgtatactttttattctttctagagaaagattgaaaaagacgaagagtataaagtaatggaattattcgaaagatcattgtagcgtgctattcgaaataaaatgtgttaattagtcacttatttaaattgatatataaaggtatacaattataatcttacgaaatatctggtggagagaagaaagaatagaaaaccacatccaagaacgccactttcccatctccactacacaacaaaaacaaacaaacacaaacacatgtttagacgtttactgtttaataatactatgaatattcatagtattaattaggagaacaatcatcgacattgaaaatgatattttggatgtattagcaacataacggaaatgagagacacctcgtgagtttgggagaaaacggaacgcatgacagagataacatcggtagagtctgtgaaatgtttaagtccgaaaatacccttaagctgttgcagactcaccaccgtcgctgctcctcccatgaatcctactatcgttgcatgcgatagaaagtccactatgaaccctaacctgcaattcccttttcatcatttctttcttctcttaattttatttttaaagctactaaacaatcaatttatcagtttgcactattaaactcacatcatcatcaaactcaccaaccttagttaataccttatgcttcaatccagttctggctagatataccgaaattttgtggaaccaaaataaaagattctacctataatatactatatatctctcttgtgcttttgaatcaatcacactatgattatgatacggggaatcaaaataaacttggccagatatgtattaaattatacccaacttaccagtaaagtaattacattattctagtatgattctccactgttacatgtagtatatatgtattaaaccgagcataccacggtgtgattttctaatagttatctagctttgtccctattggtttgttgtctcagctcttgtatcttgtttcacgtgacgtaactcgcgatgacgcatttcactctcatatagtacatagtacatagtgcttatgaatttttagatcttaagaatcaaggtaaggaaaaagttactatttggttgatattttttatgccggaatcttttcccacatgcattggaccgaatatattactcacacttttatcataagtaaaaccatattaaaaggacaaaaataattaaggagaaataaagtaaaaaagaacctgaaaattccaagagaggcttcgagaacgccggcgaaaaaagtggcggtgaaagcaaggtgaaggtaaagcttaggatctttctcagcatcaacttctttgctcagcatcgcacctgtcaacagagacgcaaccgcaaccgttcccaccgctaagtcccttgaactccctagcaccgcgtataccaatggcggtacaaaactcgaatctaaacgcaaaaaaacagttacaataagtacaaacgctacttcaaaaaatagtgtatatacacacacaaaaaacccgttaattgttaaggaaaataataaaaataaaagatgtataacgcttacaaaggccaagaattgggggcaagttagcaagtttggcgtaactgatgccctgagggatggcgagactagcgatggtgattccggcgatgagatctgatttgaagaacttgagattgtagcgtggtgcccattcgaaaatcgggaggaagtatttgaggcctaacacaaattttcttgatgcattttggttcttaaattgtctaaaagggtcgtctggaaacagagtttccttcactgagtactgaagtgacttcaagaacggttgaggttgtggagcctccaccgtgtggtggcggcggtgaagctcctccgctccttgagggaatgtgtagtcctccgtgcccatctggcgactgctcgggtagggtttgggaggttttttttgttggagtttttgatttttttctttggcggttggaagtgaggaatgaggagaagtgctataaggtggtttcttctttttatagggagtttgaagcatagtgtgtatttggtaaataattaaatatataagaacattattctaaagcgttgaatttactttcaggaatatatcactcggtgaaaagttatcttattaagtgtcagaagattatttatgaattatgattgtaattgaggccagatggtataaatatgttgaaacttaacggccaatacttgatgtacatttctagaaacttattcttaatttctatgttattcttaatttgtagttaatatcagtttgtgtaaaacaaaatttaaaaatcaattttctagtcgtgaagttaaaaaagatagaagaggataaagcaccgattcacggatgtgtgatgctgatgcatgtcttgtcccgacactgagactcagagaggacacaaaagccagaaagcttacgtttccactttcaatcacatatttcttgaattacctattctacccccaactcaactactgatgacatcatcatcgtccccttaatcattaaaatactttataaatgtatggctctgctgacatttgtccattaggaagatgggttagtttctcctcactgccatgtcacattttcctttaaataaagaacctgtatattataattttttcaagtttactttaccgggcttaatctagaatttgcgttatgggatatttttcaagaacgtgcctaacgttaggagttggagatgacgattcagcaacaacaaatggtcacaatactttagtcggcataaaatatcatgcttgttcttcttctttttgacactatgtcattaattctcgtgtgttatttttattcattataataaagttgttaactaactgttgggttttggtaacggttgcaaacacatgaaaactccacgttgctttagtaaaaatctctatggacccttccaaaacaaatttgtttacgttgactaaccatgtcattgaaagattttgtatcatcctgtgaatctatacgttattttgcacatactaattcttttcatctctgaaaagttgagcctaattgaggaaacttggaatgcctttccgttccttagtcagaagttgaagtggaatcacagctggatgggcacgtggtaaacgattatttattttacttgttaattacttgaataagttttgtttaatttgtacctaccgaatctcccctagctccaaatttgtcgatgaattttggcttatttcttgaacaatttttaactgcaaagcaaacatgttaatttgatatgttgcctataaacacgtgaatcaactatatatagtattgtaacgttaacaatctaactcctacaagttctgtaacttcacataaacaaattttgcagtatcaaaaattattgttaaacattagttgtctagacaagttgttagattgatggcatacaaaatcttaatcttacatggattaaattgtccaacttatattcgtctaaattaataaatatttcaattctagcgtttttctttacaaaaataatgacctcaaagatatataaaattataatgttggttgagataatttattatttgcatgattaaaatatataattacaaattaaatgttctatttatctaaattaaaggccagaaagttattattaatttcttataaaccagccaaagccttttctttctcagctaggcgtggcttgtttaagtgatcaaagctatgtcttttggaatacatatcataagtatttcgagccctaatttattctgtttatttatccacaaaaaaaaaacaaaaaaaaacagaaggactctggtcaaataaggagagacggttgttgacccggaatataaacaggcgatatttgacgcggctccgaatcgcagccgcagaaacaggtccttctgccgaaaatggaatttattcacaccacaaaaatcatgacacctagcgttttacgtttttgcatactattttttttccaccacatgttgttttgtttttgtttctttcttttaattctcagttctcacagataacgatggatcagcttgcgacgtacttaattactttatcctcctccacttacaatggcctttgtttcactcactcaaaacttttactatgaggagtctcatgtaacaactgcgagatagatttagacatacaatacaaaaaaaaaaaaaatagtaataaagaaagattaactatccagccctttttccattacctaaactttgttgataaaacgatctacgtaagtagttacgttacacattaccaaatatataaggtatggctaaatcgccataattgaagacgagaatatttgtttctaaagtttgaggacggctccatatagttcaacaagttttatcattagataacgataaggacaatttcatcgctagtacatcaatcatattttagttctaatagaggtcggtaaaacggctgttaaaaaaagactggaagagaagaacaataacttttaggtttgaggaggagaagaacctgtactgaatactactgatactcttttatataggttcaagccgagaaacttaaggaaattctaatgataagttggcctttaatcatgcattttacacattttcttacaaataattgttgaatattgacagcaacaaaatttcggatttccactgatatcaccaattcgttgcttatttaagaggatttagcatcaactacaaaacattagttggctttatatccatgatttagatatacataaaatttgccacctacaatagaagctaatttaaaaatctaaagttacatgaaaattcatctaaaaatatgacagagagtgacttaattgatatatctcttggtccgttatgggatattcttggaaaacaattataattattgaacatgtttttttttaatggcaaagttgaaattgtcctctaaatttatagaaatctatttttgatctgctaggtttttggattatcatgaatagatgacatccatgaactatatatataagttatatgagatattaattaccaagatctaaattatactttaaatatatctcatatgtacctttgggagattttttgagatgaggatttttacttgcgtaggaaattaaaatgtcggccagaaccacactgcagttttgtgcattaagcgtcactatcaaatccaaatatagaatagatctttgcgaaacataagacttgatggtgtatgtttcattcaagtagaatatgtttattgtttagtgctgctagatttaccatttatcaccgaaatctaaataatatcttaaatataaagtgttggtgaaatcactaaacgtatactaataaactacgtttaagtcaccaatacaaatttgaatctaagatagattataatagttaatcccaatggatttaatcatcgtgcatttcagacaactaaatcacatgaatataatttagtatagaaaatttagaccattacaaatgtttaatcgttcgtgttccatcatcggaaatatccattgaaatctctcgttagattttgcacttacaccataaagttataaaagttattattcctaaattaaagaaaattatccctagtctcaaatctgcagctttgctatatattcctttagtatctgcgttagctttctatcttaattttcaaatcttgcttgtgcttgcttacttgtttagttattccgcacaaaacatttggatatatcttagcttgatcctgcacttaaatagttaaattttataagtttagtcaccgaagattcagtctttatatgcttttgtggcagaagcagttgagaccaaaaaaaaattaaggttgacatatgttctacaaatattcaattcgtggataaaagtgatgtactaggtattacaatttaactatttaagttgaattagaaagaaaaaatgtatagcaaagagttaaaatctgaaagtatgtcattagcacaataaaaaattgcttgtcataatttttttgcgtttgaaattgtatttttatttgatttactacgataaatattataatttccgataacggtattggtgaaaaatttgttagaaatagcatattccgatgatttatgacaaaaatcaattttgtggaattatttgctcgtgaaccaaaatttattgaaaattatttaaaaaagtattgtcgaaaatattcgtcgaaattttgtcgaagcattaaaaatgatagtctacaagaatcagttttaaagttgctgctacgaaaagacctaataatgctaagctaaaggttcatgagttacaatttttcctattgctgaatttgacttggatgaaaagtatatgcactttgcaagtttgcataataatgttaatttgatatgattaaatatagtgtatcgtataaataacatgattaaaatttatgcactttttttgcatgaatgtaattgtttttttaaagtatattacatgttaaaatgaatcactaattaatttgtcataagaaaaaaaaaagaacatgccaaccggagcaaatagtatgtgttttttttttcttttcaaaacatgtataatcatattttttttgtcaacatgtattatcaattataagtttataattattatgggtactcttaccaaactattctagtaagggcaagtacctaatacgacaattttataattacttatctagttaagttataggatctggctttctatttgattaaccctatacaaatttttaaattttgaatatgaaagatgtaattttggagaaatttcttaattgtatataatttggttaaagcacaaatttataaaatttgggctacaaggacatctaatggcctgtgttatcatgaagatggtacacattagccgacaaccacccgtccaccacaagattactgtataaattgactatacatcgcatcaatcacacacattcaggacagatcactaacacaatactttaatttctgggataaaaaaggaaactgatccaaattaccaaaagcatgactctatccaagaagctaatgaaatcacttcaaacatagaaaccagtgcactgattgtattaacgacttttgtcgtttcaggttttcaaaggctaataccactttacgagttgttaatctttctacctttgtcggattattaaccttttcggaaacaaaagaagtaatcatcactcacttggtaatttggactttattataagtatataactagttgactttgttatgcgtatgaatataaatcgaagtatcgaaattgtggaaatgtttgtgtgatattctggcagacaacataaatgggttcttatatcacacctcaattatatgtactatgacatcggcccctttaccaatctacagtttcatacacatgtgtatgctatatatatatacacacatataccttctagttgcatggttacatgacttgcatccattgtttttgggatgcataatttgtaagtgacacagattatgcggaaacaaatgttgcacttgctggacccatcatatataattgtatacatgtgcatatgtctagctatgagttaaattaatttggatgtgtataaactaaaatttatatggcaacaacgcataaaaacgatgtggatataacaggatcaagaaaatctactaaaacacctgcgtggatttcctttaattgagcactaactaaaatcgagttgacatgacttttaaaactgcttctttttagctttttttttggttgatacacgaatctacaatatcattgtttgtcaaataaggactaggatatatttatacaaaatatgaaattagtaatttaaccgttgcatgaatccataatttcttaatatttatagcaaatataatattgagttcgggtgccgggcaaaaaggtagactaacctcaaaattcttagttatacaaaatgggaaattcttgttgtcaaaaatctaaaataattctcatagtacctaaatttcttgttatgcagaagtgcataataaccatagtgaccagcaatgattgaaatcgcaagaaaataagtcataattctccaaccgcaaaataaatcctttaagctatacatgctttttatttttgataaagaagcatgtagaattgcaatgatcataagttttggttgtaacccccataatttgaaaaagtgggcaagtcttcttcaagtgccatccactttggctaaaatgagattcccaatatatggattggggcattggacccactgacttctactaaaggttttatggttgggtacttgggtagttatctgcaaagttaaaagagttatacgcaaagtagatgttatagtaacaatattttttttatttttttttactatttaggcttcaaactttttgttgttatatggttgtgtgacttgtgtcagatattattatccacctttttctccttgtgtcttggcatgctctattcggaccgactactttggataggagaataaggcagtcgtgtgatgtctcggtaagaatatgcatgggaaataaagtaggcggtctcataaagtcaaataaacacatggatcgcaaatgtctggtcgaactggattaatcattatacatctcagtttaccttagttacttaacttacttttaagtgtcattatcttaacaagtgattttgattaaagaacttaagaacagttttaccaaaaatctcatgtttgtagtaaattatgtataagttcagatttatgtgcctcataagtcatctccgtatcattacacaacgctcatttttcaaatttgttattatctttttataacatgtgataaaactttttaagttgactttggtaacatgcgacaatactttctaatttgaataaacatcttacgaaatgtagaatacaaagtttaattttattttctttgttggaaaacgttagaatctagaataaaattctggttttcatatttttttttttttatgtgtgattgtaaatgcaaacaaagctagtaacttaaataaaatcacatcaacttaactaattttataaaaatacacgatcttttgattttgcccgattaactaattcgatttaaataaacaatttagctcaggtagttgtaaatagcaattgttcgatttaacatatggagccatataccaattcgattgaaatatccataataattatttgggacaattagtcaacaaatgttacaaatccaaatcgattatttttaaaagtaatataaaatgactatttaaacaaaagattttggtaccaaaattttctctctgaaccaaagtaaacaaaatcaacagtgttctgtaaatctatatatataggttattcaaaatttcgacaatttaggaaaacatattcataaaatttcgttataattttgcctcgaacttttcgcatgtcctacgcgggcattagaaaatgacgagtgtacaatggcatattggagatcacccgtagtaaccagaaaacaaaagcaagacaatttttctagcatgggtggaccgtggaccggttattgtttgctagccgaacaaaaaggactaaatatgacactatatgttttgggggtctagacaggcccattattcgcattttgggccttgacaatacatctaacatggttgatggtacacatcccttgtgaggatccaaattcactagtctcttaacaaatagtatttttcataacaaatcttaataattttttacgaagaggaggtaatattatgccaatatttctcttttaagtaacatatttatttccaaacgtacaattaaatgaaaaacgtgtttagtggaactacaacaatatcataaatcaacatgacttgtttaaaatggagtaaaaaataaaaaaatgtcatgattttgctttgaaatagacaatgaaattttgtgtttaataaataaatagaccatcaaaattgatgcttatacgtaacaaagtattaacgcatagaattaatcgataagcaccaattaccaaatactaaactagctagtctactctataatcccgaattgtaacttcattcatactattaaaaaatattttcggagaaaaagtcaaaagaaatggttcaatcaaatgtctccacattattttgttaagcaggttgctgaatataaaataattcgaaatctctactatattttatcatcctgtctgtctctggtactacagaccagatgttgagtacaaacacgtaccatgaggcatcgcggtaatgcatcaagtgtcacttagactgttcgacacatgtttgaggattgcatcaaaaaggtggctacgaagtctacagcttctaggaagagtccaagcggaccaattaggatttgttctatgtatggtcaaaacctatatagaatttgtttgctagcgttgctattatctttttttctttttgttgattaaaaaaaactatgttctccgaatgtaaaaaaaaaacaacaacgaagttctgctccagatactgttttaaccggccaattcagaataaactgatttaaatacatgtacccattcttgaaggtcaaacgacaaaaaatatatacaaattgtttgctagtgaattactattatcttttttcgtgtatttttttgttgattagaaactatgttctacgaatgtaaagaaaaaatacaacaacgaagttgtgctccagatactgttctgaccgaccaattctgaattacctgagtagtccattttaaggcatgtacccattttttctcttttgggttaagggtttaagtttttgctttaaaaagaagaaatgttttgtagccatatattaatataaaagtgtatattttataaatatctctaacttatatattataaagaaaaatacctaagaaatttactagtcagaaattaatggaggccttcgaattgcagggaatttgtcaatcaactcttggagtacttctggttggttttattttagccttaaccaatccggtttagacccaagccaaatgtcaagatgagacaacagccacatcaacattaaaaccaaacttaacccaattacaatttgccatttgcatcactctttgtttttatatttgtaaaacacaaaaggtgggtcctaatactaacaatgtgaaaaccataccgtacagtcctcaattacgaagttccagaagtttcgactattcgaatgtgcatcaaaaaggtccaaaaccgtttccagaagtttctaatttctaacttgagtgtactataataataatttttacaaatattttaatcaaatctaatatcatcactcactttctactcttcctatataaagccacctcaaaattatcttacgtggacattaccttcctcactccatcaactgccataaacgaacttaatccgaccagtttttcaaaatccgaagatgatgaactcaacttcggagactggttaatcgaaatcatcaagaatcttgtctttaatttccaattgggtttttcaaaacccgttacctcaggatgatgaacccgtttctcccggaaggctgcgatccaccaccaccaccacaaccaatggagggtttacacgaaaatgctccacctccatttctgaccaagacatttgagatggtggatgatccaaacactgaccacatcgtatcttggaacagaggaggaacaagttttgtcgtctgggatttgcattctttctccacgattctccttcctcgtcatttcaaacacagcaatttctcaagtttcatcagacaactcaatacttatgtgagtcttctctgctctgtattctctgaccaaacacaaaacagagcattcaaagcagaggaatgctctgtttttttcttttatttttttaactttcatttcccttgttgctggaaaattaccgcgaagtattctgaatgttactatataattaacttggtaatggaaaaaagtcattttttacagcagaatctgttgttaatttagcattctagaaacatcgaaaatgtagattccgtaatggctagtggagtagaagaaggtttagtaagttccagaagcaagtttcgtgtcaacttgcttactaaaataatcaaaagaaacagtcagcgatcttatcccaatttccattgtttattcactaatcagctttaacgttgcccacttgttccattctttaacatataaaaacatagaaagagttctcactccaattattgatgtttgtgagaatatgtagactttcaaaagattagtttttgaatacttatgttaaaaaaattacagggtttcagaaagatagaagcagagagatgggaatttgcaaacgaagagtttttgttaggacaaagacagttgttgaagaacatcaagaggagaaacccttttactccatcatcttcaccaagccatgacgcttgcaacgagcttcgcagagagaagcaagtgctaatgatggagatagtgagtctaagacagcagcaacaaacaacgaaaagctacatcaaagctatggaacagaggatagaaggaacagagaggaaacagagacaaatgatgtcgtttctggctagagcaatgcagagtccttcgtttttgcatcagttgttgaaacaaagagataaaaaaattaaggagcttgaggataatgagtcagcaaagaggaaaagaggttcttcttcgatgtcggaattggaagttttggctttggagatgcaagggcatggaaaacagaggaatatgttggaagaagaggatcatcaactggtggtagagagagagttggatgatggtttctgggaagagttgcttagtgatgagagtttggcttccacctcctaactagatggatttctttttggttttgtttttagtttcttctactttcaagctcattttcttctgtcacaaaaaaaaaactttttctgtttgtttaattaatttgcagtaattttgttatcaagtagtagtagtagtagtgtaaacaaaaaaatggttaattctttcatatatgtgtatatgtatgtgataaatatgattgttattaactccatctaaactcttctctgatctcttcttacaaagacctattgatgacgttgaatgatgtctttgtctgcttcactcttttttgccctaaaccctttttccaaatgtgatctctctttttcacatcatttaatgctattaaggagttttggcttatttgggtcagtgttaagacaagtccacatgagtgagcaatcatccatgtccgtgattctaacctgtaacagtgttaatttagtggaatcatgtaatatggtttactctctccggtcaaaattctgatctctagtcttcaagaaaataactttaaaatgagagcaaagacaactatgagcaagaagattgctacaaagatcaagaatccacaagatggtggaatgtctcatgacaaagaagaggaaaactctttagcagtgattagctgttctgttttctgatctaaagtttcttctacagcagctagttgttgattgacaaaaaaaaaatctaatcaatctcctatctccttcctatgttgccatcgccttgtttgcatggctggactgtagaaacttttccacggaaacaaagctataatcaatgtaaagattcttgctcaatcagtcgtaagggttttagaatggagttcaaccaaagccttatcttttttagacactactaaaacgaatattgcaagtactaaattgctctactcaatgtaaatatactatctcagcttctaggtcattttgtgtccactgtgatgaagaaacatgaatcgagagacagatctcaatatgagtgaaagtgacaagcatcaagaacatcataaatttctacaacaaccgtcggcagacaaaaaagcaaagctacttaaccttcaatgatggggacttgaattggaatttggaacaaacaatttatagcaaagctgataggttataaacaaattcgacagttcaacagattttctcaccatttacttattaaaaaaccactgatttttggttcttcagactgcttcttcattagggttttgcaaggattgaagatggaagttaaggatcgaccaccagttcaattgtggcacgctaccgtcgagtgaccgagtcagataattactctcggtttagttcggtttggattttccggtttaaaaaacatatgtttaaaacagaacaatacttttggtttggtttggtttggttcgaattttggataggaaaaatattatagttttttatcgaccgaaaaaaatcattgattcagtaacacacactttaattatatgttgggaaaatatagtaacatattgaaatatagttgtaattgtgcaaaaacaaactcttaaatcatggcatttcacaaaatgctaataagaggcagcaatcatcattttagagaattcgtggaaagaaagaaaaccatcgccatcaaggtcggcttctcggaccatatgctccgcttcttctgctgttatcttcatccccatgtccttcattccttctcccaactgcatttcgtttatagaaattaggagaaatggctaaataaactatagttaagacttaagagttaagagaatggcttatattataaaagtaagctaataaccatttgaccaagttaaatgaccaatcttttttgcattatttttgaatataaatctttttaattcagataacgaagtatttttcaagtagtatgtgactatgtgtctctcgattgttgtgttgtcgccgtgtcggtttgagaaaaaaaaaacaagaccatatgagcaatggagtttcttatggcgacaaaaatttgtgttgtaatgagtgaatgatagtagattataaagataataataacaaggtcttcaaaaaagtaacatttagtaatttctcttctttcgttatatccatctacatgatcacttaatcttattatatatgtatgtaactcgttttttattgtttccatgtcaggacaatgtactatttggtaaatagttagacaatttatttacctcaagttgagatatgagaccatctccgtctctgtcgaacactctgaatacctcaattaactcatccgatgctgattcctacaaccaattttttcattattaacttttctctacaattatcaatctttactataactaaacggttttaagtgtgtatatatattttacctgagaagtgttttgagccataatatacaagaaatcatcaaaagtgatgccaccgttgccaaagatgtcaacatcgctcatcatctgttgcagttgttccgcctttggattcttccccatcgacttcatcactttcgttagcttctccttcgtgatgaaccctgtttcacatgcatcataacatcatcaaaccgatcgattctgaataaatttgtgtatcaaatcgaacaagaaagagagagaacaaagcagaccatcggaatctttgtctatgagacagaaggcttcgtaaaactcttggatctgttcatctgtgaaagcatccgccatatcttcgatcacaaagaaaagtcaaagtctgtctttgattcaatctgatgatcagcttctcttaatttgttagtgatgagagaagaagaagggagcatctatcacatttaagtacacatcacctcttggctctaggctcttgcccggtcaaggtcaatactcatgaccttgcgttttcattagttgtgatattttttcttgagcacgattccaggtcacgcgtctttgttcaaacttatgacttcaacgcttatttttctttattttcatagttattagaaaaaatacttatagggaattaaattaggatcttgattattgcgaaaagaaagggtggagtaatgctcgggtttgaggactcaagaattaaaagtcgtacaccaagttgcattttaagaaataattgatgtacgcgtgtctctaatgtaacccttgattttgattttccattatttagtgtcctaacaacttctgtcaagaattccattcagtaactttgaaaagttatatgtcttgttaccataaaaagcgaaacatatcttagaagtgggttttttttaataccaaatgggatttaaaaggtaatcaatatgaaaaaaacggactgaccataaacatttttcttcttgtacaaacatgtctctccaaagcaatgcagataagagatttgttagagatgttgtgttctaattctaactcctacttttattcacgttatgatgagaagttgagaacgaaacattgtaatgtgaataaaggcttaatctgataaatattgtggggtctcttatgtttatgtccatccaatattagtggcttacggctaagaaaaatatgaaaatatattgtagtgttctatacttccattcgatctgttttccacttttgaatgattcaaaaagtctggataaccataagtttacaaatttaaacaaatattaaaatactgttaaaaacaaaacaaatcactaatactacaaattagaatttcggatagatgtttcattctacaatcggagaatagactagttcaaaagcggatacatattaaaagattatcgatccaacaaaccaaattcgatgcaaatatattaaaaacaatatccgctttgtgcctacctaccctgtcccatacggtcataattaagaattgaggctaagtagtattaactgcaaaaatgttccgcactagtcacactactttggtcgtaagcttactaaagagggagatgccgtgttatatatccttaattggatgttagttggtggcgttatctgttttggtatctagagatctatgcctcatttagatcttcttctcttatcatagtgtatttctcatttacaaacaaccaaacaaattaagaaataagatatgggtaagtaagatcataaacgttaatgtttgatttggtatgtatgatacgattcagaatcagactcacgcgaatttacgctcccactacgctttacttagcggagatcggattcggatctctcatttgattacattttcagctaattttgttttttattgttgttaacttaactttcatttcatcacactagtctttgtttgatgtaaaacagatatcttgattcccgtattagatggcagagctcccttatttttgtcttctcccaccaatattatactatgttcaaaaaataaaataaaaacataatatacataagggacgatcactacaaataagcatgcatcaatcgatgtaaatatatccatttgggaatattatttgagaatctaactcgtagtcgtaattataatatgtaacgatgctaccaactaattaaataagtattttgaggttaaacaatgtttttcggtttagcttatttaagtcatccaagtataataacataagtttgttgacaaaaaaaaaacagtattttgaggtttactcattactaccaactcattcgcattttgtcgtaactaatttggtatatcgtatacttgaaaaatacatatatctatatcttgattttcataatccttaacgttacagtatccacatatggtccaattaacatcactggtcaaacaagagaacaatgatcaatccgttactatgatatgcacacattaaatttaaggctcctgaagtggtttcatatattataagattccatgagccatatatcacgaattaatgaaaatgcgcaaatgataagcaaaaggcaaaaaaaggaggctacgccacctgtcaatgtagccgttgcaccttctcctcctttttaaaaataaatactctttttaacatttcctcaaacgctccaattttgttggtttctctgttccaaaatagaaacgaaatcttgaatctcttgatacgatggtgagatcaatccaagaaggagtcttgatgtcttcatcttcttcctcaaccacaagcaacagcaacgactccgacggttctctcagcccatctgcgtccaccaaaagcttcgtcctcaacactctccgtccgcctatcaccggcgcgtacaagccactcgctgttctctctgctcatgtcggctctgtttcttccttagcgctctgtggtgagttcttgctgagtgcgtctcagggaaaagatatcatcgtttggcaacagcctgatctcaagatctttgcgaaattcggacaaggtgatgggtctgtgaaggctttggtcagcgtgggaagcaaagtgttcacggcgcatcaagatagtagaatcagagtttggaaagtttctcggagaaactctgagaatgctttcaggcttgttgatacacttcccacgactaaagactatctggggaagtttatgaaacagagcaattacgttcagacgaggaggaaccataagcgtctctggattgaacacgccgatagcatttcgtgccttgcggtacacgctgggataatctactctggatcgtgggataagactctcaaagtctggagactgtcggatctcaagtgtcttgaatcgatcaaggctcatgatgacgcaatcaatggtcttgtcgccggagatggcagggtatactctgcttccgcagatgggaaggtcaagatatgggggaaagagaagagaaagcagattgagtctacttcttcctcttcctcttctttacatgttttgaaggctacgttggagggtcgtgcagaggtgtcagtgaactcggtggtggtttccggtgacggtaattgggtatacggaggaggatcagacgggtttgtgatcggatgggagaagaaagagaaagaaggagactttgaggaatggagattagggtttgagacaagaggacataacatggcagttctgtgtatgtgtgtagttggggaaatggtatgcagtggatcggctgataagagcattgggttgtggaggagagaagtgactggcatgctctgtaaattcggagtcatacatggccatgaaggtccggtcaaatgcttacaagcgtcgccaaacaatgtcggtgctggcttcatgctttacagtggaggccttgacaagagtctcagggtttggtgggtaccaaaacaagacaacttagaagagaagaaatcaagctttaagacattgttgacgcaaaaggaatgagtgaaagatatagtacttttttttttttttttggattggttttcatatacgttttggtttatatttgtaatttgttattcattttgtaaagtcatgagggattttttcaagaaattatatgaattgaattcttattttgttaacatttgtgtctaccaactgttttggtcctaatgatatagaacagagtaaagtctgatgcttttgggttacctttgctttgtattgaaactgtagcaatggaatgctcaccgtccaaatagtaaagcagagtttgcaactttctccatcaccatcatgcaaagcagacgcacccattgctttgaaagtgaagcatatacccaactttgttgattccaaatcacactctttaaagcagaataactcagttttgaatataaaaatgagatgaggaagcttttaaggaatgcattgagccaaaacataagtgtattcatgtgtgtagatgcctttcttttcgaagttggaatcaattaagaaaagtgtgaataaaacatcttcacaaagaacacaatcattatcaatccagcctcaaaaggcaaaaaccttgaatactttagtatgtatgagacattatcatcaaaaagggtactcctatatactctacatatgctaattctgaagtggaaacacaaaaccatgccttttgagttaacatggaagtcaatggctaagctaaaactacactgcctgcacagaccataacaagctaagacttcaaacacaaaaaaaaaaaaaacataacaaaaaacaatggatcatttggtttacttagttgagaaattgaccttcctgttctgataatcatctcttctaggccatgagtttttgtagttagaatggtagccatatgagtcaactctttccttattttgcctaccccaaccatcacccgttcgttttgcgtcccagtttctttgatttccctcacaccctctacgtctttgccaatcacctgcatttgccccatattctctcaaagctgcattgtcattttgcctaccccaaccatcactggctcgtttcacatcccaatttatttgctttgtctcactccctctacatgtttgccaaccgcctgcatttaccccagattctctgaaagctacattgtcaggcacaaacccacctttccatggattacaacccttaggctcccgaaaatctcgactatatcctttaccacgccactccttcatctccataccttgatttcccaaatcccggttatcccatcccccactgccccaagaatcattattccaacctctatcctcccatccctcaccagagcaacctccccaagtggtatcttttgctgtctcttttatacaactaggctgggcttcccaaggattgtcgatctttttatactcttcagaaccttttactttcttgttttggtgccctgacttatcccatccatcatcctttccctggcccgagtactcccaactgtcattaaccctatctttggctatccactgattctccctccattcctcagtcgtcaaacaaccccctgaagctgtatcatttgctttctcgtttacacaacaaggcttagcttcccaagaactaccctctgttaggttccatccactagatttcttccccgtttcaataatgtcatcactatttttccatggagtttctaacatacgagcctcaggcactgtgtcacaaccactccaattcttatccccacgcccccgtttaaaaccaatattcacatcatcaggaggagcaaagtaagccttttctaaatctctaatcagttccgggtcaacaaaagtatcccaatctacttcactaatgtaaagatcaggatcaggaatagaaacatcacaatgaagaccattaacttgtgaccaaaaccgcttcttctcattgtgaaaagtgtcttcgcaagcagaatcatcccaagtgataacattaccattataccagctcttaaagtctttagcttcaacaactttttgccatggtactgatccaatcacttcacagaatctcttttcccaaactggaatcccatcgtcttcacaataaactttgacaatcaaacacttgtaagatacagaattaagcaaattaagagtggagattaagatcaacaaggagaatacctgaagaagaagaagattgacgtccgctataccaccgctcaggagacctgcgacggtggtgtctggatcgatgattccactttcccataaagaatctcaatcgacgatgatggattttgtagaacttaggggtcagcgggagaatttgggagctgatgaagcaaacgaattggaaattggaaattggagaagagagcagtgaattcggtcggtggtgtcgtctattcaacttccggttctgtaacggcccgatttcatttcgtgtgggctataaatgggcctaatataataggtccacatataattaggctataaaatgtttttttttttttttgtgaatacatttataaacatttttgaattagtaaaagccattttaaactgaataattacttccatgaaattaacttattagtcattattcgttacaaattaaacatctctcgttagatattacacgaaaatcttactaaaaggaatgattgcattacctttgactacataacctttaagggtggaaatggttgcctaaaatttaaaaaattgaaagagttgaatgaccattcatccaatttttttaccacttaagatgaataagtaagaaaaatgattcaactcattcaacttaaaaagttggaaaaatgaactatgaatggtcccaatatactaaatccatatataattgggctataaaggtcgattgcaatcgtcatgttttcttggtcaattaaggtgtgtattgcttatgagttaatcatgaattgatttataaatggtgtgaatgatacactgttcattggcatagtttggatcgtgctacatttttaacttctttaaataaaaaatcaaatgcttctaaatgagcaaccacaatgcacgtgatcataatcatagcagactcctatcctaggaatttgttcaagaacaacttcaaattgtggagctctctttttcaatgtccataatatttctttaatttttttgctaaaaaaaaaaatccattttatatctgagaacaatttgaattcttttataaaaagttttgatttatgcatgtgtgtattgaataactattgaattattatcagttgacaatagtatttattaactattgagctaaaaccaaaataaatgacttcacgctagttaagtcaatggtgtataaaagaaattcaacattcacttgatctactacaccaatcagtaaaatgacgtcgccttccacattcgattcgctcttaataatgctatttttactcaaacagatctttctactctactttcgtagaaattgctatattttgaaaagaatacaaaaaaaaaaaaacgagagaagaaaaaagagaaaatgggcccaatcttaagacaataaaaggtaaattgcacgttgtgttgcattcaaccccctctgacaacatcattttttttaactttctctcactctccattgcttccactcttccagacatccactcgcttctcgttggtcgtgactctcacgcttcgatgattgagctctctcttcgtttccatttaattgcagttgtgttggggttcgatttttaatgaatcgaccaagtccaagtgtgtgttgtgcctctttctttgaaaccaataccaatggtcaaagatccctaccatcgatttatttcatcactgtcctcaatattaattgccactacctatttgtacggatgtgaattatgagagtgcctttgtctctaaggaacggtaaaaacatttttgctcacttttagagaatttaatgcaaaagatgtaatgaaactggcaaatgttttagaaaattgttttgagtagatggtaggattaattagttagccataaaactagttgacgtctcacgtatcatctaatttatacatatgtataaatatttgtaaaaccgatattggaagtatatatgtggacatgtctccacaaaacacaacttctgaaatatatatccccacaccacatggcctgtgtgttggctcgtgggatcccattattttcttcctcctgttttcctatttcgaagttgtttttattcttcttgttttatactgtacaataattttagttgttttgtgaccagaaaaataagcattaagcggaatctcggaagcgacatgcatacttaagcttctagctttacaacgaatagccaatactaaaactatcaccctagtccccaaaaaggatcaatttataagaagcttgaaaatcgttgtgtacacacatatcatatcatatatttgtatcattagcctcaaaagagcttggccttcacattcgtttgatcatagggtggtgatatgatgaattaaaacaccttctttccaactttcacataatagaagagacatagttgtaagtagaccacaagttacaaactatttttgtaatgttgtgtgttaagtttttggcactcactctctcgcgcgtgtctcaccaccacacacaccactgtccttgcttttgctaagtcattaaggacacacaatttggatatcgatcacaactttagtctttacatgcaataatacgaccatacgttcataacattcttcttttctttgccttaaatcacggtaataaccatggatatatcacctactctttttacactttccacctcaccaaagttgcatttattaaggacaaagatgcataacctagaaatcaaaaattatagttgaagaaaaaatcaccaaaagctgatatctctggattcccaagttggagagtagttagagtgagagggtaataactagcacggacaagaacatattgacttttcaaactcaaatgataatctctcttttcttttgtatatctttagagagattacacttcttgtcctatattatatatatcatatcatatcatattacatcatcttgtgtggtccatcatcacataacacattaaaactagagaaatggtacaacaatcttccttctttctcttctcctatctcttacatcaaatttcctgctttttattttttacacctctgcatctttttggttattaagggtctctctattttatcagtttttttcttttcttacttcacttcctgtaacaaaaacaacaaccacaacaaacaaactattaacctaacaagattgttattttgtgtttcaccatccattaactctttttacctgtttatatcccaacacgacaggttggtccacccctaccgggtaacattccaatcgccggtaacctattgagaagattcatgaacgcaatgttagataccatcaacttgataccagaaattaaagtgtgtagaaggagtaaaacataaagtgtggttgaatctagggaccttggcatttggtagttgaaagagttgaaggagtcggagagtgtagaaggagtagaattatcatcattatcagaagaaggcgaccacagatccgatccgttattgtcagcagaatcagcaaacagaagcaaatgatgagcgggcgatgcaaacggactatctggcaagctatcctccaacctaaaacaccccaaaaagcttcagcttaaaatacacaaaacagtttccttgcagagaactcttgtatataaacctacctctctggtagattcattgtatcatcatcagatccttctttagaacttcctttccctttctctcctccatcatactctctcttgatcacggacaatgggcgtggagatataagtgattggctgaaaggattcggagagtgaatgttggtaggggaattgagttggaaatgcttcttgacgtcaagaagctgcagattcatcagccttctgctctgaagttcaagaatctcttcttcaaacttactcctccacaacacatcttgagtgttgttataaaaccctctccctcctgcacaacaagcaaatcagtatggctgcaagtaaagggttcttcagtaaaaccaaaagagacaagtgctttagtgtttgtttacctagaacgtccctagggctagaatcaaggcctgttggggacagttctcgctctgttgtttggttagttctgcacaacaaaccgcagtaaacacaagggattcaaggaacaatcaggccaaagtataagagttactaatactagcaatataagtacctgtatttgtcagggactttgcctttctccttgtaaggcttgacaagaactctggaatcacacacaaagtgaggattccctttggcgagaatgctcttaacagtctcagggtacacaaatgtcacaaaaccaaacattctcttttgctgatatggtatcctcacatcttgaactggtccaaaagtactataaccaccataacaacatcttatgtcacatacaagaacatacattcagaccaaataaaagttcaatgtgttttgttggaaattacctgaagtaattggacacatcttcctccctgaacctactgtcggcagggaatgtcagatagatctgtcttgaagctggacaagccatagcagaaagatcaatcctttcaggtctccatcttccaagcttctgcaattcatctcctatcatcaaagcagcagcagctctgcacagaaatttacacaacttaacaaaaataaataaatataaaaaacacattttgacagtaaatgaacaaaagaagcagttgggaaaaaggtcaaacctttgaacatcgttttgctgcaagttaacacctttagttgaaaaagaagggagagaagagcgagtcatgaagtggtgagcaagtcttgggggtaccgagttagacctaagaagctcgattctgcttggggagccaaccaaatcagctcctccatcactgtggacgaatctgcagctagctccgtttttgcagaagcctctagcgaagtaagaacagggcacacctccaaaccctaaatcagaatcaccaccataccctaaaccgtccaaaacgcagctaccgcttctcgcatgcacagagcccaaaaaatcagtacttctggagttcatatcatccatgagctcgaaatcgttggttaaatccctagaagatcttcctccattagcgtaaaagggcaaagaagctggattgagtgaagagccacggttgttcttagggctaatcaactcatcttgatgactccacggagaccttgaacagttcatgagacctaactctttcttggctttcactataacagagtgaacaagagtctctggaccaaaagctagccttatcatctctttttcaccgtgatcttgaagaaggagaagacccatgatctttgatgcgttttcagggtctaagctttggattctagagagcacaatcctagtagcttcatatccatccatagcttttctctctctctttagaattagaatagagtagagagaagaagaaggaaagagtagtgtttttgtagagagtgtttgttgtcttgtgtacagagaggttgttgtcgttaagagggtctctctggtttctagtgttggattttagtttaatgttatttttttgggttacttaactacaaatttattaaacctatctactactactaaccttaactataatttttcatctctggttcctgcgaaacaccagtaaataccaaaaattttaaaagagaaatagtataaaaagttactactctattcatttttttgttttcttctcgctcgcgtgcttacaagaagaaaaaaaattaacactttaagaaaaagagttggagaaaaaaaggaaaaggtaaatacttttttaggaaaaaaaaaaaagtttttgcatgccgagaatttttccatggaaaacaaaacaaaaaaaaaatcgtaactttctatgtttgagtaaaactttactagaccgaaaagagaaataaaaatttactttacctgaaaaagtcaaaatgatcaatagatgaatctctgtggagaacattattagcagaagagtgaattttgctgcaggtgagagactgacggttactgctcctttgggaatagtagatgaagaaagatgtcatcatattattagattcttcttatcatcaaatttaagagagaaagataaagagaagaagtacgtacacttaattgtatgtttcagtgaatctgagtaaactgagttatgagagaagaagatatcttccggatttgggatctctgtgttgttgttgttgtgtggatcaggagaaaactctctggtctttctttcacgagtggaagaagaaagagagagatagaaaaaacacagagagattgtgtaataaactgtttttaaaaagcaaattaaaaacaaaagatggttgcattgcacgttctctgacacaaccccatttttttttttttgttcattcggacaggaaagatacacgcgccttccgttgggatgtgttggtcacgcgccggtgattgatatgcagaccagctgtatcgctggggtctccactctctcctactgtctctttctcatttttcatcattttattttggtagggacacatttttaagtatagctaagcttttggtttgattacaaaattaaataaactacctggttttcttattcttcaacttgcttattttaaaatgaaacggcagaattttattgtcatttaaagataaatttgagtaattagggaaacataaaaagcatgtcatatccaaattgtcaatttgctcagcttaatctctgcttttattgtccttttatttgtttggtgagagacacttgaattttatttcattcaatcattattgcatgcttcgatcacatgaaattaaataaaaaccatttcattattaaaatctgtcttaattaatctcatgggcatatgatttattgtcaaatgtgttgaccaattccataggtttcttatttgaagcaacataactaattatctagaaaaaatcttacacacgtagtttcacatattcaaagtattgagtatgtttttttttgctttaataaaatattcatgagagggtaggattaaagatgaaaagacatgattgttctaaattaatgtagggttaaaaaagaattattattttttgaaaatttaaaatttcgaaaggacctttttataaaagaagaatgacccacaaaggaaagcaatgattataatagttattttttgggtgtcaaaagcagtggtctagtctagtcacaagagccgaggcacctaacacttcactctatgattatgtgttttcaatattataaagtatatatactctttgctaaataatttaccccaaaaatctaacattgcggccttatcattgactcatccagaaatatttgattcgcatgtaaattttacatgggggagaatgattattatgcgcaaatgtttgaggcgaattgaaaaaaaaaaataatgattggggcagtctattccacaccaatggaattcatttgcatttgaaatttatgatatacacatgcatgtatgatgcataccttaagtccttatctattattggtttgggtattcaccatacccacatatagagaatctataaatggacccccaaagatcttctaagcccacaattatcatcatatatacatacaactacaaatctacaatcatcctcctcttcatttcaaaatcaattccacatcaagatgttttggtacccttaaaatagacatatgtagaataagttaccaatctgtgtatatgttaactatattggaatccgacctctatgcccctaattaaacccatatgtatatatatacacacaataccacagcccgtaaacgcttaacgtgagaatggtggtggttgaggaacaaaagattgaataggatcatgaagtgtttggccctcctcgcactccactcttgccgcttcacacatcatattacttgttgctaagttgcatccatctgtgtgattacacgagatccaaaattgtgtcaagattaggtctaggtcacttttgtataaaaatgatggtgatgaatggtttactattagtttacgttttcattattcgaaaatgtgatttttactaagacgataaccaaataaatgaaactagttctttagcgtttcgtattgttcaataaaatttcagtagctcaaatttcattagctatttactagttcttcctcttaatgctaaatttttcatcaacgtatcagattgttgacaaccaatttcaactagtaaaccaaatagtaggagaaatcaccttctttgaacacaaaaccagaaccgttgcattgtttctgaaacgagaaactacaaagttcaacttcaattttcccctgcatctctaccagaagagcccggagtctgatcaattcagtttccaccatttcttggctctgaagttttctaaggaattgctcattcagagattgcaatctcatcacttcatcttcaaggtatgcagtgcgagccttcttcttctccctgtacttcctcactgcctctctattaccacataaccgtttcttgttgctactgtcagaatgatcattctcttgctgatcctgctgcaacataaaaatatgtatctataacaatccattaaaatatcatcagaaacataccatatcttaagggaagagatattattacagagatgatgagatgagtgtgagcgtggaagcatgtgtgggagtgagaagcatcctctgggcctggagggttacagctatgagtgtgactacatcctctcgttactcgatcttgatctttatcttcttcctcattcatctttatatatctttgattctgaggtccaaactcaagatctccaaagaaaacacctgttctgtttgggacatagaattatggtgatattattagggtttttgattaaagtaaagatggtgttgaagaatatgttcttgattaacatagtggatgaataaaacagtagtcaactctttataattttttgacatggcccaagaaagaaaaatcttacagagaatcaaagttagaaactcgttggtttcctctgcaatccttgcaacaacaaaacatccaagtacaaagattgataggctttttggttttgagattaccttaaaatgtttttttttttgtctgtaccaaactttgaaatggttttattactagaaattacgacggaacaataagcaaagccatttaccatatccccagaccccaatgaataatatattataagaaagagaattggttctttaatgtcaattgtcaaattgtttcgtatagaaaaagaagaagacttttctcatggattttaacttattgcacgtctctatcattatttagtgttcgctggcggacacgttttgtaaacgtgtttatcatcatcatcttgcttcccgacgagatttgagttcaagaagcaaaaatggcgagtttcatcaaggcatggggtttagtgatcatctcactgtgttacacttttttcattgccaaattggttccaaaaggaatcaaaaggctcatactatttttccctgtcttcctcattttcttcatagtacctttcttgatatattccttacatttactcggcatcacggctttcttcatcgcttggctagcaaatttcaagctcttattatttgcattagggcgcggtcctctctcttcaaaccataaacccctatctctccctattttcttagctgtctcttgcttgcccatcaagattcagctgagcccaaaacctacaaaaactcactcccatgaaggatccacagagggtcctttgatttataccataaaggcagtttttgtggttctcatcatcaaagcctacgaatacagtaccaaattgcctgagaaagtcgtgctgactctctacgcgatccacatatatttcgcccttgagatcatccttgccgccacagctgctgcggttcgagccatgtcggatcttgagctcgagccacagttcaacaagccgtacctagcgacatcacttcaagatttctgggggagacgatggaacctgatggtcactggaatcttacggccaaccgtgtacgaaccgtcacttcaactgttctcggttttgggcccgaactattcccagattcttgcagctttcgggacgtttgttgtctctgggataatgcacgagctcatcttcttctacatgggacggttgaggccagactggaagatgatgtggttcttcctcataaatggattttgcacgaccgtggagatcgccatcaagaaaaccattaacggtaggtggagattcccgaaagcaatcagtcaggttttgacactcacttttgtgatggtgacggcattgtggctgttcttgcccgaatttaatcggtgcaacatagttgagaaggctcttgatgagtacgcagccataggcgcatttgcagtcgaggtcaggaggaaactgaccgcatatcttttttaaccctgccgtgtgacaaagcttgagtgatctctattttaacttatttttttctaacactgtaaaaccgacatttctgcaaccccatcatttacatggcacacgaatcaagaaaattgtggaagttcataatactatacataaaaccttgcaaacatgatatgaaagtaaagatgaggggaagaaacccgctcgagtagaggcaataacatgcaaaatggatcagcaagatccgcctaagttacacatcttaagtctatctaaggcagttagaatttgtctacaactcctacagctaaagcttttcccaccagaaattaacgcacagggagttgctttcttactgatcatggtgttcataaaagtccaagcttttggcggaagatcagttccacttcaccacgaatgctctccacatctgcagcatagtctctcttgtattcatccgccattgattcctccagctgtagcttcattctctctaatgcttcttccaacccgcaggactctttgagaacctgaggctctatggatttaagttgaagaagagtttggattgctgtaagagcctgaaacatattttccgagtagcataagttagaaagagatgtgtgccaagattcatagaggaagaaaaacggtcataggcccctgtaatagttctaccttttcttggagatcaagatcaagcaccacaatcaaatcgacaacagactttaggaaaagacgatctttgaaaataggaagttcatctttctctgtgttctgtagttgagactcagccaaatcaccgactaagaatacagctttccgtctcaatttcatatccaagctcccattgttcattacatcctgtaaatacgacgaaacatggttagtttttttccaatccagagaatgaatgaacaaaacctgacatgatgtatttctggtttgctcacccgaagcataatgtatccatgtgctgcaaaaaacaagtcctgaccagctatattatttcgtatcaaggcagaaacagcaaaaagtgctttcacagcttcttcagtagagctggagtttaccatctttattagtgttgttaaagctccaagttcaagaacctgtaaccaaattcacagaacaagaaacatgatgtgtttcagacggtttatacttcaacacacggttctgctctacaagtacaacgaaatcaaacctgctcttgaacaaaaggattgttttggctagctttcccgagcacccacgcagctagtttccttacttctgtgtcatcatgattaagctctcctgctacaactctaagccctcctgatttgctcaaatctacacaagaaaagaatgatgccacaattgatcagactcatgtgaaactgtaacacaaacacatttatatatacaagattcaatagcaagttacaagcttccagttaccatttgcattatcaataggttcaacgaggatcaaaagttcctgcaaagcacggtgacgatcttcaagagacaaggatgaattattcaagtcatctatcgctatttgcatcaacttcgcattcgacggcattttcagcttctccaccagctcctatataagagcactttcatgaacttccagagacaaagcaatcagaaattaaaaaccaaaatcacaaagtccgtacctttaactctaattgacgcttctgtaactcatccaaagacatcttctctgcatctttagctgcttccttcaatgtcgcaggatccgagtgacctaaccgaagatatccaacatagaatcagatctaaatgaaattagtgaggaagaaggacactgagaaagaaaatttacctattgcccagtgtaacatcccatcaagtgaagagaatccaccatcgatttgatcttgctctccgatcaccacaccggaatcttctaccaattcggcttcatctctaacactagaccagaccattcccccggaagagttaactttctcagcgatcgaaaaacccaccaatgagatcaccaccaatagaaacacatatcggaaaaagaaaatcgtcggcatctttgtcttcccggcggtagacttaatcagtaaataaaggtttaagctttttcccgttttgcgactttaccatttatgttttcagaatttatatacgaaagtaactactccttaacaacgtgttcagccaattatattattacacgtcatctcatccatcgtcaccttctatcgcgctaaaacattaaagtgccaggtggcagaagcgggaccaattgaatgattaatcttatttacgtcaactaaaattagggtgtaaattgaaactattattatttatcagtacgaaatagaatttttaaaaactataagggtggatttgaaatatttaggaaaaggcataattaattagaaacacgacccctccacttccttgagtctaatcaaatgtgccttaatttacaaaaatgacttctcacgactcacgccattaaactccacgtacacctttccctttcactttcatcttcttcttccctcgattcaatgggttatctctcctgcaaagctggatccgccgtcgcaatcgccgtttcatctgccgcatcaacctccggatccacctccagcaaagcttctgctcctcccgaatctcccattgaagaccgtcctagacttcgtcgtttcctccatcgcgatctcgaatcagccacaggaggtttcgacatcaacaatctcctcggacgtggaagccatggaagcgtttacaaagctgtcatcggttcacgtcacatcgcggtcaagagaccttcgaaatctcgagaaatcagccgtgagttccacaacgaattcgagattctctccagaatccgtagccctaggtttgtgaatctcttaggttttagcgccgataactccaaagaaccacttctcgttgttgaattcatgggaaacggaagcttatacgacgtgattcactcagataccgttttaaactccggtgcgatttcgagctggagtaagagaatcaaaatcgctcttcagattgcaaaagccgtacatcttctacattctcaagagacaccgatcatacacagagatataaaatcagcaaacgtattgatggataagaatctaaacgcgaagctaggcgatttcggattagcgatcagatgcaatgttgatgatcaaaaagtgaaatcaacaccacctgcaggaacaatgggttacttagatccagattacgtaacggctgatagattaagcacgaaaactgatgtgtttagcttcgggatcttgttgttagagataatcagcggaagaaaagcaatcgacgttagatattcgccgtcgtttatagtagattgggcgattccgatgataaaaagaggcaaaatcggtgggatttatgatccgagaatcggaccaccgattgatgtaagtgtgaggaatcatttggggttagtggcggctaagtgtgtgagaacgtgtagagagaaacggccggggatggaggaagtggttgggtggctcacggggttgactaagtcggttaggtcacgacggtgggatgagttaagcattggaaacccgtgtatgatggtcgagacggtgggtggtcgacccgtggaatgattttttatttgtttaaaatcaagtgcttcgctttgaagccattgttttttctcttatgggttggtcaatttattcatttaacataataaagcatatactgtaacatcatggttgcatatggtatttgactggatcatcatattcataactaccgcttgttctaaaaacatgccatgtaaagccttttgcactagtgcataactttctcatatcacaagttttttagcatctctttgtagagttggaacttttcatcattgacaccatttcttcgtgcaaaacacctattctcgatattgactcatatacacaagacatgcgtatgaaccatatcattgatccaattatatatagttttgtttttttttctactacttatggaagaaacccaaagtagagtgtttttaaatatgttgtcttagtgttaattgaaaaaactaaactgttttttctaacaagaacaaaaaaactgatcgtcttaaaactccactgtaaggtaaaaacagttgacgaaaaaaaaggaaaaaaaaaagaaggtaaaaatagttgtatgaagacagacgtatatctacaaaatgctgtcattcattttctaaacctttcatctctcttgtttcttcaaattcaactcctaactcgtattctgagataactcgtagtctaaaatcatcaaactactcgaagcaattcttttaaattctttcattcaaacactcgaatcacatgttgtacaaacgtatatttttctctttgaatataatttgacattacattcaaaaaaaaaatcatcaaactacaataccaacgtccaagtgatttcataaaccttataatagacaataattagtacattcaggaatcaggagtttattggagtcctaaaacatgatttaaatgatcaatataccgaaagagtgaagcaagatgcatgttcagaaaccaatttagaaaaaaatctaaatcgattccaaacttaaaaacgactctaattaatcaccaaagagaactacttaattagacttacttcttgattgacttggatattggtgagactaaggtaaacactaagtacaatcatatgtacgactttgtaaagtttacgatatttcagctacattggagaaaaatgtaaattccacgaacaagagcattaatcgaccaatttggaacaataaactaaagagtaattaatatgatattcatgttatgattcctcaaattttacaacatttaattttaaagtgattattttgtttccaaatttcacacacgtgtctctaacatcacaaatccattgtagtagccaaacacattttccaagccacaaccgaggagttggtttgtcaagtgacacaagtcacttcaattctattagtcgcgaaaatgtgctttcacttaaggagaaagatctaatcaagaagttccccggacaacctttcggcattagtttcagacagtacggcggttatgtggccgtcaacgaaccagccactcggtttttgtactattattttgtggaagccatcaaacctagtagttctactcctcttgtgatctggtttaacggaggtacctatagaaaatatatattccctatacaaaactcctttacttggaactagttatatatttttatttttttacatctaattagactcttcaaaaacttgaaaagataagtcttctattaatatctagtttttgaggatgtataatttcctataatcgttgagaattatacaagaacaaactttttataaaaaaaaatacaggaccggggtgctcatctgtaggacttggggcatttcaagagcttggtccattccgcgtacatagcgacggcaaaacgcttttccgcaatctttattcatggaacaacggtacatgattgattgtttactatcagtttctgcttcttttgatgattgattgagaagatctaaagcataagacacaaagtatattattatattgtttactttcagtttctacttctttttaatgtttttaaagtttgtagatgttgtttagatcttgagtgatgtttgatgaatttagataaagtaatttgtcttctaaacccaaggcaagtgttcataattgacattaggatgattttacgtcatattttgcttattatgcttcatatgtttaatggcttacttattttataatgaagcaagtagagactaaaccagactaaacaaagactacagttcgatagaaatgatatggatgacgtggtatagagcctataatgagcgtcgagcttatacaatgatatgcattcatgtgttaatattttcttcaagttgttatattgtaacattttaatttactttgaatcaaagaaagacataagtattaattctgatcaccaatgaccaagtttatagaacaatgacatttttacaagttatacacatgctaatgaaatatatatatatatatatatatatatatatataatttcgatttagatatctaatagtcaaagggttacaatttatttttcttagaaaaacttttaattacaaatattcttttattttagataataattcacaagacctaatagattcttagtttataataaatatatcttagttataatatatatattaattttttgcgggtgaatatttttatattaaatttacccacgcatcgcgtgagacattttctagtgtatatatatatatatatatattggtagtataccatccaaaaatatgacttacgcaagaagtaaaactgttgttcacctagaccattttcttctctttccattgttgtttacgtcgtctaatcaatgatctataacttctaaatgcacatacatatgcatcgatcatcaacaaattatacattagttagtaattgtaggtctaacaagtctcctcgatcaacttgctctctaagggaaagcaattgatcacgaacatcaaactcaatacattattgaaggcaattgagggtcatgcatgacacacctctctcattaactgaacttcattaaaatcttattaatcatgaaacgaaactcttctctcctatagatgactgaatattatgattgtattaattcacaattagagctcacaggagtttatataggtaaatacgtaaagtttagacactagagattttcctaatgaaaattaagtccttaatacatatattttacacaaggcgcttgcgtgtggatttgcagaggcgaacatgttacttcctcttggtaaagcttcgtttactcttggacaaattaatacgccatctagatggtattgacatagattttatttatttattttatatgcctcacaatccagcaattataataattcaacgaaacggaatataatgtctttagcatcatctaggaagcgattaagtccctaattaaaccatatattgttaaaatagttgggacatctaaagaaaatttgcaatcggttattatatgtgtaagtgctactacacacgaagaaaaataatgtggatctcttgaagcaatcggctaaggatattgagcctagagaataaccagacggttttcaacacataaaggaaaattttcaagaaattcgatactttttttttatgggagacgagacaacttttataattatttacaaaaatatagtttcatttgatttataagttggttataaattgactttatttttaataattaaatataatttaatgtgtttatttaaataatttagttataaagacgccatgcaattgttgttaaaaccaaaagatgcactgtttgttaaaaataaatatatgctttatttacggcgggacaagtagttattatgttatgggatttatagttaagttgttgcaaaaaggttaaatttggttataaaaatagttgtcaaacgaatacctataaaaagcttccattcattttccaaaccattcgtctccatttcttttcaaatccttctcctaattctcataggattcctagataatagaatgggaaaacgacaagattggtctgtgactgcttgtattttcctgttcttgtctttggcatcacaaatccattgtaggagccacataccttttccaagccctaagcgaggggttagttcgtcaggtgacacgagccacttcaatgtgattcaacgcgaaagtgtgccttcgccaaaggacaaagatctaattcagcagctccccggacaaccttctgacgttactttcaaacagtacggtggttatgtggccgtaaacaaaccagccggtcggtttttgtactattatttcgttgaaaccatcaaacccggtaacactactcctcttgtgatctggttcaacggaggtatgtacatatagagaacatgtattccctctagaaactcctttacttggaactagttatatattttatttttttacaggaccgggctgctcatctctaggtggggcatttaaagagcttggtccattccgcgtacatagcgacggcaaaactcttttccgcaatccttattcatggaacaacggtacctagctataatttctaaaaatatattattagaaaccaacaaggtatattctcaagacatattgagatcaactaagtatgctattacatatggaattgcagaggcgaacgtgttgttcttagaaacgccggtagggacagggttctcatactcaaactctccaataaatgggaaacaaggagacaaggcaacagcagaggataactacatgttcttggtgaattggcttgaaaggtttccggaatataaaggaagagacatttacatcgccggtcagagttacgctggccactatgttccccaacttgcccaaatcatccttcaccgtaacaaccagaccttaatcaacctgcgtggcattttgattggtaatccatcacttaacagggagatccaggatgatttcggctacaaatttatgtttagtcatggtttgatatcccaacagcaaatggacaattataataaattctgcacggactccgacttatatgattgggacaagtgccatttggcgtcccaaaaaatagaagctcaaaaaacacacttggacatttacaacatatacgctccattgtgcctaaactccacattgagcagcgaacccaagaaatgcaccacaataatgaaggctgatccgtgcagtgggaactatttgaaggcgtatcttaacataaaagaggttcaagaagcgatacatgccaacaccacgaaaataccgtatgagtggacctcttgcaatacgaaactactttgggaatggaacgaaaaagataggtatgtctcattgacacctatccttcaggagctgatggggaagggtgtccgagtcatgctgtacaatggagacgtggacctggtgattccatttacatctacattggccgtggtgaagacgatgaatctgacggttgtaaaggaatggcgtccgtggtttaccggaggacatgtgggagggttcacagaggattacaaagggaacttaacctttgtaactgtgaaaggagcaggtcatagtgttcctacggaccaacctatacatgctcttaatatctttacaagctttatccgtaacactccactccctcaaacagcctgatttctaacttgtaccacccctataaacttaataggacactttggtccattgattgaatgatctaatgataagtatgatgtgtatgcgtctgtgatacaacactcaacaaattatacttaagttaattattgtcaaggaaataaaatttcgaaattatcaagcataaatttaatacagcagtagccactttacataaacaaagttcaatcccaaaaatgcattgtttctcttccaaacataacttgttcaaatctataacattcctgttgttttactgatcatcattccaagttagcagatgaatattcccatttccttgatattctcttaataggccaaaattgtgtcataatgtctctagttagattcggttgcttatctcttgtaatgcaacgcttctctcggaacggcattgtcgaattctccggtgaccaataatctgattgcaccagcagggaatctgttattttgatctgatccttcaattggctgtgagagtgagaacaatggacgatgattatactagagagatgatggatctcaagaccttagacactcgaaccctagagaagaaagatgttctcgctaagatccgggtaacttttttatagggttcctgcttccagatctttggttagtggatctaatgtctttgatatattctcgatgatgtatacatttggaatcatgtgaattctcgtacttagaaattgagtctggtgaaaaagttataatcttaattggattctttaacgttttgtgtgactactgtaaatttggtcactctttgtgtgttgatatgtattgaatctccatcaacattcgtgtcttactgtcttgtggtactacaaggtcttgctgtcacgtgagtaaccagagggtccagagaggaggacgggagagatgcccccataattattttctgaatcgcgacttcaacttaagtttttcgattagtcaagaaacgtaactacacatttgatagcattattacgtctccaatagtaaagtcctctattgctacttcacacgaaaaaaatgtttgtggatctcttgaagtaactagctaaatcgtgaggatattgagctggaaattgtctaagatttgagaattattagacggtttctaaacgctcaaaagggacttgaagaaattcgacttttttttattggaacctaggcaactatatcattatttacaaagaattagtttcatttgatttataagtttgttacagttaaacctcgaaaatataacgatagataatggctgctaaaaaaagataaaaaaaaatgtggattcaatgtttgataagaaaaaaatattgttatattttatctacggaggacaggtagttattatgttctggccttgtcggatttgttgttaagtttctacaaaaggttaaatgggttattaaaatagttgtcaaaagccaaaataaaacctataaaaatgctgccattcatattccaaaccattcgtctccatttcttttcaaatccttctcctaattctcataggattccaaaataagagaatggtaaaacaacaagattggtccgtgactacttgtgttttgctattcttgtttttggcatcacaaatccattgtaggagcggaatacatgtttcaaaacgtttggaggggtcaaagcaaggagatggtaagtcaggtgatacgagcttcaatgtgcttcgtcgcgtgctttcgccaaaggagaaagatctaatcaagaagctccccggacaaccttccggcgttagttttagacagtatggcggttatgtgcccgtaaacgaaccatccagtcggtttttgtactattattttgtggaagccatcaaacccaatacatctactcctctggtcatctggttcaacggaggtacacatagagaatatagattctctacaaacttttttttttttattggactcttctacaacgtgaaaagatataagtcttctaccatctataaacaaacttttttataaaaatacaggaccggcctgctcatctctaggtggggcatttctagagcttggtcccttccgcgtacatagcggcggcagaaaacttttccgcaatccttattcatggaacaacggtactttttaaaaactttattaattagaaaatttagtgtgttttcacaagatatatatgatgcatgagatcaattaagtatacgattacgtatggaattgcagaggcgaacgtgttgttcttagaatcgcctgtaacgacaggtttctcgtactcgagtaatccaattgatttggaggaattgggggagaaaggggacaaggcaacagcagaggataactacattttcttgatgaattggctagaaaggtttcccgaatataaaggaagagacatttacatcgccggtcagagttacgctggccactatgttccccaacttgctcagatcatcattcaccgtaacaagaaaaccttagtcaacctacgaggaattttgatcggtaatccatcacttctcacatcgatccaggatccatacggctacgaatttatgttaagtcatggtttgatgtcccaacaacaaatggacaattataatcaattctgcctaagagatgacttatatgataatgacaagtgcgcactttcggtaaaaacaatcgatgatgcaaaaaagcacttggacacttacaacatatacgctcctgtgtgtctaaactccacgttgagcaggatatccaagaaatgcaccacagttttggaggttgatccgtgcagtaaggactacttgaaggcttatcttaacagaaaaaaggttcaaaaagcgatacatgccaacaccaccaaattaccgtatgagtggacctcttgcaataacgaactgactgagaattggagcgaaaatgatagagacaccccgatgatacctatcctccacgagctgatgggcgagggtgtccgagtcatgatctacaatggagacgtggacctggagattccatttgcatctacattagccgtggtgaaggagatgaatctaacggttgtaaaggaatttcgtccctggtttacgggaggacagctgggagggttcacagaggattacaaagggaacttaacctttgtaactgtgaaaggagcaggtcatagtgttcctacggaccaacctatacatgctcttaatatctttaccagctttatccgtaacactccactccctcacacagcctgatttctaacttgtaccacctcgattgactgaacaatatacgttggtctataaacttaataagacactttggtccagttattgaatgatctaaagatggttatgatatgttttgtatatgtatataaaccaatttacaatgttgtttacgtcgtacgtctaaataatcaatgattaagttctaaatggacatacatatgcgtgtgtgatacaacacaacaaattataatgaagtttgttaagcaaccaaaatgtcgaaattgtcgagcataagatcaatacaacagtagtcacatacacaattcttaagcccataatgcgttgtttctcttccaaaaacaatttagaatttcaatattcaatattcaatatcttttatacatttcgttgcttttattgtttcactgctgttttactgaatgtcatttgaagttatttacgtttttccacaactgcaaaattgtgaagtttttcatgtgagatttcagagataggaggactgatagggagtgagtgagaccacatgagactttacagatgattttttttcttttttcaatttcaaaataaggtaaggattttgggggttttgaagaaattttcgttgttttggtaaagcacatgtttgaattaggtaatattttttaaatggggtatatattaaatgacaatattttaaaaacaacatcttattcaggcaagataaaagttcatgtagttttcttccgaaaaaggttggtgtccttattagaaaatttcccataaaattaataataagttcatgatttattatttatataaaatttagctatgcaccaatatgtagctttgtaatctatatacatattcctgcctaccaaaaaaaaatctatatacatattccttttttatatatatttcttctcaaaataactggcattatcaccaatacagatttttccaaagttgtgtgagatctgtaaatttggtcactctttttgttgatatgtatattgaatttgatcattcgtgtcttgcagttaaacaaggtcatggcggaagtctaaaataaagagttttccgtctttgttttcttaaataaaagaaaaaattagttacaaaaatagagaattctgttttgccaaattttaggaaacaatttttctgaaaactttttgttttggtttaacttttaagggttacaaaaattgaaaaaagcaaagcttgtttggagtagttacagagggaaattaattgttaagttgttacaaaaggttatgtgtgattaaaatagttgtcaataaccaaaaatgtatccataaaatcagttcattcattgtctcaattctttcatacaaacttcattctgctttctttcataaagatccaatcaaacataattgaatgggagaactacaagactggtcggtaaccacttgtctcctccttttattgtttcaagcgtcacaaatccattgcacgagccaaacacatgttttaaaccgtcttttgtaccgctcgaagcgagggtttggttcgtcggttgacacgaaccatttaaatgccatccgtcacttaagcgtgtcttcaccccaaaacaccagcggtgttaaccaacaagagcaaaaggagagagatctaattgagaatctgcccggacagccttcagttagttttagacaatatggcggttatgtgaccgtgaatgagtcagcaggtcgatccttgtactattatttcgtggaagccaccaaaaccaaaaagtctttaccccttgttctatggctaaacggaggtatgtatctaccatctagttctacttttttttgttttttcctattcgttgagaaatcatacaagtaacaaaattgatgaattttgtccacaaaacataaacattcatacacaattatatatatatctatttttaaaatatgcaggacctggttgttcctccctatatggggcatttcaagagcttggtccattccgcatatatggcgacggcaaaacactctataccaatccttattcatggaacaacggtacaaaccttcttcttatggaatctttcgtctatcttcttttttttggatagtactatatttattattagaatctcccgcaaaatttaaaagtattatttacgtgtggattcgcagtggcgaacatattattcttagaatctccagtaggaacgggattctcgtacacgaacacagagtcggatttggagaatcccggggacatgaaagcagcagctgataaatacatcttcttggtgaaatggctggagaggtttccggaatataaaggaagagaattttacattgctggtgagagttacgccgggcactatgttccacaactcgcacaaaccatccttgttcataacaagaaccaaaacttcatcaacctacgtggcattttgattggtaacccgactctgaacgacatagtcgaaacaacgggttcgtttgattatttagtaagccatgctttactctcacaagatagtctccttagctacaaggaaaactgcgcaactgacactccaaaaatggaggtggattgcatcgcattgagtatgaaaatcgacgacgacataaaaaaaatgaacctatacaacatattgactcctacgtgcataaacgccacgttgaccccgttgactaaccaatccaaagaatgcaccactgtgctgcagtatgaaccgtgcggaatgcaatacatagcagcttacttaaaccgggaagacgttcagcgttccatgcacgtcacgaaattgccgcacacgtggatgctatgtaatgaagccacaggattcaattggaaccagacggattattctgcatcgatgctacctattctcaaagagctgatgaaacatgatcaacttcgagtctgggtgtacactggcgacacggatacggtgattccgttgacagttacaatgcacgctctgaagatgatgaatctaacggctgttacggactggcttccgtggtttagtgaaggacaggtgggaggtttcacagaggaatacaaaggcaattttagatacgccacagtgataggagctggtcatgaagttcctctttacaaacctaaggctgctcttactctttttaaacattttatccgcaactctcctctccctcttaccccttgatcatctatacactttgtaacaacaccacaacactcttttttcttttttctttttcacattcatgtaattattatataggtaaatgttaattgtgattttcttggataatctgcaaaactaacagaaaaaaacggatttaaaatttaagtaactaaccaaaaaaattgcgtattttgtatatcataaattttttggatcgttaagtagatctttctactttcacatgcatgaacataaggtgccaacaacaagctagatataacatttttttaccgattattccgacatggtgaaaatggtgtttccccttataaaatagccaaacttttttgtttatttggagtaagtttataaccacaaagatgaattttatttatttattttcatgtttgatttgcgacgaatgttaaaacatataatttaacactaaaaatttgtactgaactgcaatacattacatatataaacaatattttctaaaaattggctcatttattgtaattctattcagttctagaaaagaactcgtagactcaacgactagtaattttaataaaattacgttaatttcgtattttttcttttttcttttgtcatcagatattatttagggccaatcttttaggaatcgcgtcatatttcgttaatttcgttcaatagcgcaaaaaaaggtttcgatatctaaattattgatacagttcaaatcataataaattcggaattcagggtttaataaatttcggtttacatagatgaataatcggttcagttgagagtcgtgttttgtttaaaaaaatggggagaacagagaccggcgacgaatcgtcggcgagaaagatgcgacgtaaagtacccacgtcgatcgaatctctagacgccgatatactgtgcatcatcttctcttttcttgatttgttcgacctcgttcattgtaccgtcgtctgcaattcctggtactcccttcaatccaaatccctagcttcttttttctcatggttgcgaatcccgtgttgaccttattcgaacttttttcttattgaggaatgctgttatcaaaaggctgaagctgctacaagcttcttgccggaagatgcaccatctcggttccgactctcccagtagctccacgtcacttgatcgtccagctgagatagatgtggaggattttgcgatgaagcatcacaagatggcattgttaaggggtcgaatcgaaattgagcgatgggaagctcattctcaccggtgaggcaatttttccattgggattgtttttcaatgttccagagattttgtttactcttgccatgtttctaatgttctctatgtcagggtttctcagtgtcgaatgaagaaaggtttgcttcttactggtgtcggtgataaggttaggattttttttagtatacaattcgattaggtattgtatgtgttatctaagtagcactggctaagttaatctgactactttgatcaggttatgcgcctctggtcattaaaaagctacaaatgcatggaagaatactcccttcctgatgcttcttccttgattgacttcgattttgatgagagtaaggtaaaccttctctaaaggtcatggatattacttaaactgggaatgagctaaaaatggatttaatgatcaatgatgatacagaaacctcagtcaagtcactgacatgaatttctgaaaccaccagtatagcagtataatctgtttccatgtcacagtttgcctcacctgttgtagctgaatatttccttttggctaaatcttgctattttctatagaaattggaagttgtatctctagcatgggagtattttgattctgttgttgttgttgttgttgagattgttggcttggttggtacccgcattagcatatggaggagaaatggacaaagaagcatttttccatctcgtgcaggcacctttcctaaaggcctttgtatgcggtatgtcagaagatactctcctgatatcaagttcctgagaacctatctgtttctatagaaagatcaactgatattccatgttactgacaaaagtcggtgtgatacttcaacatggctacctagcccctctgcccctgtaaggttgttggcttctctatccacactgataagttgtatgttttctttttcaaccagttacattgacccagaagctgtagttggatgcgaggatggaacagctcgtgtatttgatatgtacagtaagacatgttcacagatcattaggtaagctatgtattatgtgtctgttgtgttatggaacaacacagtgaaactggaaaagaacggtttttcattatcaaaattgtttacaatttcttttgagaaagctaaatcacaattttcctatcagattggttaataactatgtatgtaattgcaggactcagggtgggccaataacatgcttatctctaagcgataatcaactatttcttagtgggtcgtcactcgggagagtaacagtatctgaccctttgatggatcaaccagtggccactcttaaatccacgataactgcaggaggtaaactcaaactcaatgtcagattgcatctccagtgacatttcttaaagcaacctccattctctacaggtatacagacaatctgttttaaccaaggcactaatctcgccttcattggaacaactggtggatatgtttcatgctgggacctcaggtatgttaaaatagtcgtctaaggtttttttcaaagatgcaagttttaattcactatcttaagacgttataaccaactattatctaacaggaaaatggatagattgtgggaaaaacgagtgagtcctaatgtcgtgtactcaatacaacagctaaggaatgacacatcggttatggtagctggtggaatagacggtgtgctgcgtatgattgatcagaagagtggaagggttttatctagagttataatggacgataaattctccacaacatcaacaaggaacaaccaagtggtgatagagaaaagaagaggaaaaagagtttctcaagacatggagattgataaaatcgaaaggaaagttcggcctcaaatcagttgcatagcaatggggatgaagaagatggtaacggctcacaatggtaaatgcataagtgtatggaagttcaatctctcgtaaagtaacaataaacttgtttgtaagtgacgaaattggtaacaatagcattataaatgattgatttaaagacaaaaccgattggattgtgtaagagctacaaaagttgaaacactggaaacaaaaaaagaagggtttgttgtctatttggcggatttcttggatggctcaggttgagattcagctttgatgatattgagttgaccaccttctttacaagctgcattagttgctttcacttcattgcaatggtttatgaatttcgtaagctcctgctccacacaacaccaaccaataactcacaattaaagatccaatcgattcagaatttagggagattgaagaatatagaaattacccgatcagtgtccatctctttcgtcatctttgttggtttcacatttctcttccctggaacaagaagatgataaaatctgagaaatcaaaatcgaaagggatttgtgtgaagtaaaaaaaaagtgaatacctttgcgagtttgaatggatttgccatggcgattaggagcaatagtcttcctcttctgttggcccttgaactgattgctcttctgcgtcatctttggatcgtcgtttctagctagggttttctcttctgtcgaagggtttttgttgtaatagaagaagaagaagaacaacaatcaaaagcctatataatgggctcttaaggcctttatttatatgggctgattaattattgggcccaatttggagttttctaaattcaactctgctaaatttttgggaggcagaagattttgttccgaggaagacacggatacgcagaaagcggtaaaatcctccttcttcgtcgtccttgtaaaaaccctttctcatttttggaaggttctttcaaaatcctttcttcgattgctttcggattctcgctcgcttcttcgatttttggttttgattcatggtgaatgtgtttcctccgctaaggttaaacgctcttcttcttcatgacagtactttcagtgacgtcatgacgctgcatctgtatcatcactcccgttttctatggaggaatctctgttttcctcggagtgttggaaacttgtgtaatcggaactgttctctcatctctccttcccttgcacgctctgcgaaggtgatacttgtacttgtatcgttcaattctgagctatttagatgtggtttttactcttgttatgtagtctacatctgaatcatggctctgattagtttgatatacagattttctgaatcaattgaatgtttctttcgcgacatttctgtttactataaactcaaaattgatctctgaaggatacttattatttcgttctaatgttgatataaacatttgtggtacacagtactattgcagttccgtagctgtttctgaattctcaaatgaagcagctagtggcagcacattgacttctataagtgaagatgttacgccacagtcgataaaatatcctttcaagtcagaagaaagagtagctagtactgctgcttcttcaaatggcagagtgatgcttattgatgggacatcgattatatacagggcttattataagcttttaggtaattctgctactcatgtgtacatcaaatgttaattttttttcctcccgatctcacacttattgacatttgattgggcatgtgcagcaaggttgaatcatggtcatctggctcatgctgatggaaatgcggactgggttttaacaatattttcatctctttctcttgtaagtgatatcttgagtattgttctccagatgttcatttttactgtacttaaatctgatggttgagaaaagcttcttgtagcattaacgatggctgaccaagtaatcatggttgcgtataattatgtttccttaaggctaaagtttatctttcttgttataactttcgcattcgacttcttaccttgtttcattgtgttctcattttcagctgattgatgttttgaaatttctcccatcccatgtggcggtaaattccattatccatttaacatcgcatttctttatatctgtgatgatcgaatgaagttcttgtagttttcttaatgttggatagcccctactgacttaattaactgtgtccatgcaggtggtgttcgaccatgatggtgagtcctaatgtaatagtcttctataattggttaaattcatggacgtctatctacttcatgtggtgatgtaggaagaattcaggtttttggggacttttagtgtctatagttaaccactttgagtgtgcctctcagatgatttaaactaattcattgatataagcccttatttcaaactctatagttatggcctctatacttcctgattttaattactcaagtatgtgtatgatttccccttatcaattgatgctaattgctcctctagtcatctataattttgattttcatcatcctctttcagatgaatagataaataattgtcttcagcttgttgaatgttgttgcccgaaaacttagattatgttgagtgttgatgttttcaacttcatttgtatcatagtgaatggataaaagtttcagatttcaacttctggccactactgagaacatttattcgataggcctaagagtaagcaggtggagatctagatggtgatatattgaccaaaattgattacttaatcttgataatcattactgtactatttatggaatattccactaagttatctagaaaagcttctagtaatgcataatagtggtaatctgacaaatatcatgtagtaatcatggttatgtcatatgtgaggcaagaagattaaatgctttctggacctatacgtctctagttactcttttttaacaaaatagagcctttttcaggagttccttatggcactacttctaattcatctacaggttatcgttctgcaaaaggtaagctccatgtccttagtcaaactaaagtaatttaattgacagtataagaagtggtcatttttgcatgagagtttagttagtatgctgactcgatggtgatgtatgtaatatcatcgccgatgatctccaattgctatacaagccttcagtatattgcttctaaatatataaacttgcagtttgaactgattttctgctgtgtgcctaggagaaattattccggaaattatggcttacttgccaaggatgatatttgaagtgaaatgccaactttgtcttcctttgggtgttttgcttgccgcttttgggcagtcataaactttggtgtagataacagagggtcggtcatatgcgcttccatggcggtctttggctatttgtaaaataaacttaggtcatatccaatgatgaacgtaggtccagtatgcttgatgtcttttgttgtttccgttctgtacatactgacatagatatgcatatccaatactctcttctttctacgtgatgggttcacttggctgctcaaactgtaaattttaggctttttggcactctaaacctcgacatgattctcccttgtctttgcgcagagtgtgaaggattatttttatgcatcagtatcaaacctatctttgttcatgtttaaatttttacaggcatgaacttccgtcatactctctacccagcatataaaagtaatcgtcctcccacacctgataccatagtacaaggacttcaatatctcaaagcgtccatcaaggcaatgtctataaaagttatagaggtaaatcatgcacatgattgccatatttcctttcattgtgatgatttctcactaatgggcagacattccatgaagacaggtgccaggtgtagaagctgatgatgttattggaacactggctatgcgaagcattagtgccggtttcaaagtactcattttcagctattcgagaagtgttcactacttattgaatgctcagggtctgttcaatttgtccttttcctagaagtggactgatcatttgtttgttacccctttacaggtccgagttgtctctccagacaaagacttctttcagattctttctccctcgttgcgtcttcttcgactaacaccacgcggatcagagtatgaaattcatgttagatggataattgcctcattgtagaattttgcgtattatgaaaccatagttgctctttgtatcctgtatgttttttccactcagttgtgtcaaggctactgcttcttgtggcaggatggcttcttttggaatggaagattttgctaaaaagtttggaaatttggaaccagcacaatttgttgatatcatcgcccttgctggagacaagtctgataatattccaggttaagcccacttcctctacccctcacgaaattgttaatttctggggatattcctttcatagccgcattttgtgtatcacagaaaagttgagcaaaagtgcacaatctacatacaaacgtttagccaaagtgcacacaggaaagggctaaagtgatctaatgatgtttgtgtgatgcaggagttgatggtattgggaatgtgcacgcagtggaactgatatctagatttggtattcactgagtcatgctatattctttgatttcattgatttgcgccccatgtttcctattactcacttttattgcattatcaggcacgttggagaatctgttgcagtctgtggatgagatcaaagaaggaaaaataaaggaggtgagtgaacaagtgttgcagaggttaggcaagctagtgcttctgtgatatgcaaggcctaatattataatcttccttgtctttgcaacagtctctaatagctagtgcggatcaagccattcttagcaagaaattggtaggttttcctgtttttctttcatactttcattcatttattcagttgttaagttcacaaggtagggatgatgaattgtgttaatggcaggcactgttacggtctgatctcccagattacatagtaccgttcgacacgaaagatcttacttttaagaaaccagaggtttgtatttgtatgacgatatacatctactacaatagactaactgaaaacagaaagattagtaacagaggataatttgtgaaatgtacaggacaatggtgagaaattgagtagcctgttaatcgcgattgcggattacgcagaaggattttcagctgatccagtcatcagaagagctttcaggttgtgggaaaaactggaagcagtgccatgatgatattttatgcatcttttttcttactcgtttctttgtattgggtacataaaatagagtaagttcaagccaagcttagaaagttctcccacaaaacattaaagcgatactttcacaatccttttgtaaagcatgctttattgtaactatggagaatgatgaagttgatgctaatttagaatgctcctccatgggaggttccattacataaaacacaagggagatgataacttcaagctagcctcttctgaacacatctaaaatgctgtctgaaactctgttcactttgctaaaacaagaatctcttctgtcttttagttgaataggtaaactaacgttaatatcatttactattattagtatccgctaaattgattataaaaaaaggtcaagttaatgcctcatggagacatatgatgatgatgatcaaagtaaattataaactaagaagaaaatattcgtctctattgaattaattatgtacattagtgacaataagaactaaaaatattctaaacaaattaacaatgaaagaaaagagacaaggtactaaactagtacgtaaattagtagacaaactccttcattggatctcaaaccaaatcgaaaaccaaggaccaaggtagcattatgcttttgatgatggggtctgaaagtgtgttaccacttaccaccttgtgacaactttggaacactgagtattggtgaaaccactactcaaagcttaagcccgttcgcacagtgacccggctttgagcttatgaaataatggactccggggtttggtgagcctgacgagatcgaggcctgtcttgtgcacggctactggagaagtggggtcgcaatatctgaattcacgatgaccgctgatttctaagacatcgacgttgtcttcgatgttgtattctaaaacaagattgtctcccactttaaactgtttctccacgctccaatagataaaatcacaaaagcacaatctgaccgacagtataacaataagccatctagttcacaatcaatgggctggactagatgattcattaattaaaagaacgtcatatgaccataacttggtgcattttcaccattgttttgttactttgcaattagtaattcatcaaagtaaaaacacttgaaataacaaagatcttttcattcacacttttttcgaaacaaaagagagggaacaacacttttgccattccctctctctcccgtggaaaggagctgaattacaaaagaaaagccgatttggctttatcttaatgatgatgctctcactttgcctttgggggctctctatttacattcttttttacatccattttcccatatctctaccttccctagagacacacaaaagcttaaaaaacacagcaattttcacacacacacacagaagttcatctttatttagccactcttcttcgagcgccaacacaagcttcttcctaaaccttccttatgatgatatctgaaacctgaacacaataacaagaagataagcaaattgaaactaaactctcaaactgtattcatatttacacattgagatttcagtgttatacctaatttactttcaccgaattcaatccctaaagatcacagcatctgcaatctccataagcggttgcaatgactccggcgtgaattttctggcgaagaaatagtctaaactcgaattagatctccgcagagagtgaatcagctgcggcgagatctcagaggcatcgtacgtgtgaggatgaccaccaacactaccggtccaattaacacgtgtgagtgtaaagtgactacatccttgaggatcctcaagagacaacaaagtcggaaaataatgttcttcagggtaacaagattcaacatcaaggcatggtaatttgaatttcctccatagctttctctctttgatcaccattagagcatgacgtttcgctaatacgaagaactgagatccaacacggaagtcttggtactggatctcaggaagcatcgcgtcgtctcctcttgcgttgtatcgtttcagaaggaacggttcatcggagaggatctcgatgaagctttgttgatgatgatcggagaagaggtggttgtggatgtaagagaaggaatggagagggatacagtgttgtgagattaaagcgaaatagagattgttaggatcgtcgaggattgcgtttgctagtaatcgtcgttcggcggagattaacgtcggagaagctcgtgcggttcttctcgccgggatgaacttagcgttgattgatgaagaatcgagaagaggagagacggaggaggttggatctgcgtggatgtaaacgttgtagagatcttggtgaccttggaagaagctttcccagagaggtaagaaggttagatcggagtttgttaggaagaggaaagcgatctttgggggtggatttggagagagggagatgagacgacggttgttgttggtggaggaagagacgacggcgcggtggaagagagagaggtcgtctaggtcatcggcggtggaaatgagggtagaggaagagagaaggatgtgtggtgagaggatgaagaggaagaagagaagagaaagagagaggaagagagatagagaataaacgagtgtagaagatgagaacatctctctgtatacaacaacacagaatttctctgaggaagaagaagaagaagaagaagaagattgattgaaatgaatgagttagaaaaaattctgatgtgacaataaaaaggaaaaaggggaataatgacgtcagcaaaatggggacacgtgaaattatttttaaaattatttgggacaatcgacacagttgctctatcgctatttgtttacgtggggctgttctctctctatttatataataatgagatacggttttttcagcaaccagattttaaagttatctgattaaatctaataataggatagagatagagtcacagagacatgttgttgactttatgacattattttattctttgcttatccactcagtcatcatttatctcaccagtcagacataatgtgttgttgttgtgaatttgtagatgcttccgactatacctgattacctggccattcagaatcggtttggatcaaaaaatttgggttttcggtttagaaatcgaaacaaaccgaattagttgaaacgaaccgaatagaaattcggccaatttggttttgcattggcgtgtaccttgtgactacatgtgtgtgtgttagatgagatctatccacccatttttcaaatcatttttgtcgttaagctatcaagattctgatattttcctgctcacttttgattcccaaaacaaaaaactttcttcaattattctattcatcttctcatggcggctctctccaccaccttctactaccacccactctgcactaaccaccgtacaaagagacaagcctcaagcagacacggagttagatctatgagagtgatgtcttgtcggaagcagaaattaccagaagagaatgaaggagtgatccagagaacattgagaaggatgatttcagaggctgggaagattgggaagaatctgaagccagagaagaagaaaggagacgtcaaggacctgatgcttatgagtctctcttttgctgtttatgtttatatctctcaactattggtttgtgcttacttctcctggcaacatctcagcttccccaaatcttcatggtagtagctaagctagctcctccttgtaaattctgcacaaatcagtaataagataagaaattcaattccgacataggagaattgagagttgtgatctttcactttggtcttatataattgaattgttaagcttctcatacctctttatctgctttaactccggcagaaaaggcaaaccaaccattgcgataacactatcaaccagttaaggctctttgttttagagccgaaaggagatgcaagagcctcgggcagagtcgctgagtatgccttgaaaaccaaaactttgaccgtaattgttagaaagaaagagagattcctaaccatttcgtattggcctcctccaatttatcctccttaaacagagagccccatccattttccttctgtgtgctgcaccaaacctttcctccatagtcatatcactgcgagcttttccctgtacaatccaacctctaagtcagctataagcaaagagcttgggataaaagcttggttgtggagtgttcaggtaaggaaacaagaatcagcaaatgatcttaaagaaaaaacgttcctcctttgtttcatcaaatccaacaacttcagcgtcatctaacaattccgctatagatggaacattgggaaaaagaagagtttccatctctcctatatgctaaattcccagcaaacatgcaagagcgcacgttcaccagacttgatgctggaaacaccaatagctaaaccggccattacttgtatctctgttcatagaggacatttcactccttagtttttaatcttgtttaaagctctgtatactaacataaacatgcatgaatcagctttaaagcaacaaaagaaagaaaggaaaactcaatttctttcctcccaaatattctttttcattaggttcacatgaaacgcaagatttaagacctcagctttactatcaactttaggtaggtaagactacctaccattttgagaaggctcacaatgcaaaaatggaactcaccatccttgactgattcggtttcagctccagcaaaccaaagtgtttctaataaacttggccgtgcattgaaccacggagttccaaaatcaatgtctgtttaaatcattggccccagaatttgaactacacacagagtcacagacattcattacgatggttgaatgaaatggtcttgactaagaagtaagaacaactatgcacaattgagaaactattagctcgatttccagaaactatcactatcgtaatataaaagtcccaggatcgaccaaatcggacgagaaagactcaatgaagaaaccccataaaaacatggtcgaagtcagtataaacaaaatcaagagtttggtcgtcgttgtggatttggaggagaggagagtgagcttacagagtatgagaagcgagaagctcaggggaagtgtgactcgtcgtcgtcgtcttcgaagtcactcacgaccatcgagagatctgatgattttggtaaaatatcaaaaaaggacttcaacttttcacttaagtcaaaacaagcccctataaataaattctgttatttaagccttgaggcttgagctgcgtctttgttgttcactaggagagttatttgagcggataatttactaaaactgaatgtccatctcccaaacaaacattttacgttttcatgttatataaaagaatactatatcgttagctagaatattgtagttaaatattaaagtagtgtattttacattttgtctgaactttgtcatctttgtttcatgaatggtcaatggtgaataatggggagagaaggaacgtgaataaagggatccacaagtgtctccaccattttctgagtaaaaacaatcacatcctttcattttcaaacccctaaaccaaattgtaaagtcagaaaaaaagaaaaaaagaaacacacatacaaatcgaaaagcttttcttcatctcccacgttacaataagccctaagaacgaataaggcaactacagagagaaaagatgaattcaactacaacaaaaaacgtttgtggagacaaatggtaccttaacctagacaggccagaagaggcattgaagattcttgtattcattgccattttcgtcgtccgaactctcctccattatctcatgaagcctctaggccaaccttacctcaccaccgactttgctgtatgtcaaatatctttttgttctttgtctatctcttttgatttctatattaactcaaattttctatgcatcagatagggctaattctaggtaatattccaaggtttcgaggggcattctcggggccttactctataaccctcaacaacataatagaatttggaatgatctgccatatgtttgtcatgggtctagagatgaatccaagcgttcttctcagaccaccaaccaaagatgcattcattgcctacacaagcatgatcacgacctttgttctcgcctttgtcacaactcctttcctccactataccaaaacttctccttacattttctccctcgccctctccctcatggcctcaagcaccggttctcctatcctaacccgcgtcatcgccaatctcaaaatcagaaaatccgatcttggaaaacttgcatcagccgcaggtgtccatacggacatgatctctaccttgctttactgcttcggcttcattttcttccctacggagaaacctctcgctcgtcctctccacagattcttcagagccctcctcatgttttgcctcttcctcgctcaggtcactttcacttccattgtatccccaatctttcttaattgggtcaacaacgagaaccctgaaggtaaaccactcaaggggtcacaccttgttatgtccctggcatttgtcgtcttgatctgcagtttcccaacttggccacctgaatcaatgtacaacccaattctcagtgcattcacggctggtctcttccttccaaacaaaggaagaatgtcgaaatggatcatcaacaaaatcaattacttgctcagcacggtcttctaccctatcttcttcttctgggttggattcataatccacatgagaaactttgacattactgacaaaatggcgtgggtaagattcttttctcttcttggcactgttatagccggaaaagtcaccggaacagtcttgtgtggtttactactcggttatcatgtcccggaaaccgcatccttaggactgcttttgaccactaaaggccattttcatgtctacttggcagctttagccattcgggtaccatcaagctttctctttatgttttgttatttaagctatcatcaaagtaagatctttactctctttctttttcgtttgatgcaaatgcagactaacagggtgaaaagtacgaccggtgcattgatcatatttatcattgtcttcacggtggtctactccccattcgtggtcatggacatcatcaaacgcgctagaaagcgggtgcctgtgcacatcatggcgcttcaatggctcgatccaacaactgaacttcggatcttgattggtctccacggtccccacaacattggttctacgctcaacgttatggagatctgccatggtggccgtgagccgggttccatattctatgcgactgacatggtggagttgactgatgagattgcagccacgctgaagaagggcggaggagccggtcagagtaatgattcagtgacggtaacggataggtcggtgacggaaatgagagagagtataacggcagctgtgaatgggtacggagagctccgcaatggacaaggtgtgacagtgcggcggatgctggcgttgtccacgtttgtgaccatggcccatgacgtctgcggtttggctgatgaacttatggtttccattataattctaccgttccataaacggctgaatcctgatggtactctcgatgctggtcatgctgggttccgtcatgtgaaccgcaaggtaattgttccatctcagtaatactctgtttctttcagttctcagagagataatttggcatttgtgtgtgcagattctgaagaacgcaccatgttcagtaggaattcttgtggataggtcgttcgggcaaacagaagaggcatggagaccaggagcgtccatgggcattgctataatattcataggtggcagagacgaccgagaggcactagccttcgctgcacaagtggctcgacatcctgctgtgaaattaaaggttatacgtttcttggaagacaagagctctcaaaacgcacaaaaacgaagcagcatcctgaacagagcgagtgtggtagatcaagaggaggaaatgaagcttgatgatgaatgttttgctgagttctacgaaagatacatagctggaggtggaagagtgtcttacatggagaagcatctcaccaactcctctgagactttcacagctcttaaatcactagatggagagtatgggctggtgattgtaggaagaggagggggaagagcgagcagtgggttaaccaccggcctcaacgactggcagcaatgtccagagcttggtcccataggtgacgttctttcaggatcagatttctcacacaacacatcaatgttaattattcagcagcagcgtactcggggtcagctagaagggcttcatgatgacttcactatactgtgaatatctgtacaaatgcactttacttagtagcttgggaagagtagtagcttcaccatcacaactcttaaagagactttgtacaatagttcaaacattaagcggtttatgtagatagaatggtaaaaagaagaggtaatctaagcattacttcatagcatcctgaaatggtgttgaaacatagagttaaaagaagttacaggccgatttgtttttgatttatacaaagcataactagggaaaatttcccaagctcattattagtcttgattggtgcttagcaaaagacaatgtaaaacgttttccccgatgtgctgatggagaactccaagttccttaaaactgattcgaaaacttggccacctctgcctgaaaacacagaagggtataccataagaccaggtacatcaaacaacatcaatagcatttgatattcgtctagcttattaaccacataatcagataagtatatccgaagagagaaacttatgtacctcaaactggttcttcaagtagtcgagctccttgtccaagtcattgatggcctggttgtatgcttgcattggggaagactggcttgttgtgtgaatctacatacagaaaccactttcacaattaaacaacaacatacaagatctttctataagtccttaagcaaccagtaatcccagaggaaactgttaacactagaagcttaaaccaagaaatattcacggtttccaaacaaccatacactacttttaagttcctaaaccaatcttttggatcctaaggtcaatcaatgaactgaaaaaaacgcagaggatagcattgttctttccaattcaaagcaacaggctctacagtagaagcaactgaaaaacttggaacttaccctcactatgattttgtacttaagaggatgaggaagttggtatccagcaaacaagacattctcgtcgcgatgaagttgcctaaaacaaaaatttcagaacagagctgacaaaaattagggctttcttctttctgagaaaagagttgcaaaatcaacaaaaagacgtacatgcggacaatgtttccaatcgtatggtcttctctctcaaccgtgaaggaagcagcattgatgatcttcgtatccctatcataagaaaccctagaacatagaaatcgagagggtttagcacatgtaagaggactatcgagtatgatttcgagtgatagaaacttcaattacttcttggtgccttcagggacgacgaatcgctcatatcgttcgggagcattcatggcttaatcggagatttcaagcttcgctctctttttcgccgcagagagacagtcaagagttcttcagtttctttctggcaaacaaaatataatacgacgtcgtttttcataaaagaaaaaagatcgaatctccacgtgttatattattattggtgtatacagtttgggtcggatcgggccgataaaacataatatttccgtttaaggacctctaggtttatattatttacacaataaaggacgagtgatttaattcagaaacctaacaaaaaattcaggaaaaaaagaaaagaagtcagatccctaaaaatcgaacccgaaagcgtaaaacttgaaaaccgactatggcctttcacgtagcttgtccaattacatggtatgtttttttttctttcttttggcgcctcctttactcgttggcttgtttgtttttactaatcgaattgttctaatttgggggttttcttctttctttcgttctttctccgcagccggaaaatttgcttctgcgttttggggttttctcggaatcttcatggtaatgaagtcaaggatgtgtatctcaaagagatccattctcttcaggagttcgtgcgaaacccctgggatgctgaggtttccaaggacggtaccgttcagatccatgtgcctaagcttgctgttttcgatactggtcctcgcattgcggctagaaatgttggtgttgggagtgattcggcgatggaggttgttgctgcatcatcgaatttggtaccagctaaacgcaccttggtgttgcagaagaaggctgtggaagtttatgctgcgaatgattgttctggcgacttagaggttcgaattcttacttgcgaaacttgtttttgtggttaggggttactgctatgtcaattgaattgaacttgtttataggaatctgtctttgtgagaaaacgtgttttcagtgatgttgattatctgtatctcgtgtatgtgttttggtgttgtcctgtcttttcgggttctgtaatctatgatttatatgtaaactacttgtgattttttggatgattatgaagtctattctcgtcaagacactaattcaatgttatgtctttctctatgtaggtttcagtcaaagacctcaatgaagaagatcatgatcatcacagtgcaagcataacatgtcacatgtgctatttggttgaagttgggaagagtgagagagccaagatgctttcttgcaaatgttgtgggaagaagtatcatagaaactgcgtgaagtcttgggcccaacatagaggtattgtttcataggaatctattgtttatgacttatgagtctttctgcctagattcttataccggtttttgctagcagatctttttaattggagctcttgggcgtgcccatcttgccgaatctgtgaggtatgttcggacacaactttgtgctcaatgattattcttgctctttacatgctgggctaggtatgactgctgcttgattatttgtattcttttgatcatttttcctttagggctgcgggactttaggggatccaaaaaagtttatgttctgcaaaagatgtgatgatgcatatcattgtgattgccaacatcctcggcacaaggtatagtatttattgcgtctgtataaggttcttatcttatcttttgcaaattggtttattttaatctctgaatattacagaatgttagttctggaccctatttgtgtcctaagcacaccaaatgttacagttgtgagtctacagtccctgggaatggccagagcttacggtatttaactttttgccttgtgatacttgaaatttattcatgtaaagtgcactatctcttattattccttctaaactttgcaggtggtttttggggcatacttgttgtgatgcttgtggaaggttgtttgttaaggggaattattgtcctgtatgtttgaaggtatatttacatattctcctcctcggtgataggaaaacgtgcgctctgtttccaagcatcatatttagatattcttggccataattaatagagttatgtattttggagttgttaccctatactatccagacatctgtattgcaaaagcagttatttgcagaattttcttacattctttgaattgacaaattattttgatttcatcacgtaggtttacagggactcggaagcaacgccaatggtgtgttgtgacttttgccagcgctgggttcattgccagtgtgatggaattaggtacatatcgttaatgaaattgtacttctgtgtcctgtaagcatgtctcccaagtgtgtatccaaatactttaaaataacgctaactttgtaagctaccatcgcagcgatgagaaatatatgcagtttcaagtggatgggaatcttcaatacaaatgttctacttgtcgtggggaatcctaccaggtgtgtttcatgggtccttaagtcttttttgctatctcatatttgtcccaggttctagttgattgctgtgaatgacaatttggttatcccattttctcttttctgatttgtgtttatgatgccaggtcaaggatcttgaagatgctgtacaagaaatttggaagcgaaaagatatggctgataaagatctaattgctagcttgaaagctagtgctcgggttgttgggcaaactggtggtgcccctcttatgaatcagcctggctctgtggaaagaaaagtttctgaaaaggctatggtcaatggtgaagaagagaagccattgagagttctcaggataaaaagtagcaggcctcaagattcagatagtgagaaatttggaaaacacgctacagagctgagcactgtgaaggcgaaaaagttggtgataagtataggtcctcgaaagacaggggttacaaactctacgagctgcgatgtatcaaagactgcctccaaatcaaatggtatgtgtagtgtcatttttgcatgttcagtaaacttatatgagaaagatacactctgattattttcggtttgttctttctttaaaattggtatacatagacatacttataaagagctttggtaattacaggaaagcaagaaaaattgcaagcagaggaaacgttttcccgggaagagcgtcgcagcttgctgggaaagaatagtgacgaaaagagagggtctcgaggtgaagtaactactttaaaggctgagggcggattcatagggagacactcagatggtaaaggagatttaaatagtggctcgcatgattcatcgcagaaagattcaaggcgattgttgaaattgaaaataaaaaaacataatcccgagggccaagaaagtgaagcccctagcattgtatatgaaagaagtaaatctggtaaaggacataggtcaaagaggaaaagagcatcacctccagctgagaagtcagcgttcaatgaagatgaagatgtatcgctgtcacgagaagacagtttgttagacgaaatgcttgacgctagttggattctgaagaagttggggaaagatgcgaaaggaaaaaaagttcaaatacacgaggcctcggatgattcatggtatatgagattatattgttttttgctattgaacttctttaattattccaagtctctaacaaatgaggaaccaaaaaaacagggagaaaggagttgtaagtgaagtaggaggagctggaggcacctcgaagttgatggtgacgctagagaatggaaaagtgaagacggtcgagctcgggaagcaaggggttcgatttgttcctcagaaacaaaagagaacgagaacgtgaggctatctattcttgagtatccacatttagaaacaacatgagcttcttcttcttctttatcttctatacatctagaatatgtatgtagcttgattagcttcacgagaagaggtacctgcttagggaaacaagaggtttaaattgtaaaagatttgagaagaatgaattcaaacaagcatttgatgactcaagacttgtaaagtcaacccaacaacaacacatgatgtaattgccacgcgtcaacagacataacgtaggacccttctgcggataagaattaccaaaaaattttacacaaaaaaacattatttggatgagaaatgaatacggaactagggaattaaaagtgtcggtctacaaatatagcagtagatgctagaaatggtagggaatcatatgagtgataacataaagttaaaattgagtttgggagttgtggaattaagggtaacacgtgataatgaaaccaatcttcttatctcttcttcacttattgaatcatctaacgttatttcaatttttgttaggtacttgtaataataacccaaataaagcaaaaaaataataaaatcacgatctgcgtttcccctgaaaaaaaaaaacagagagaggaaaaaaaaatgttgcagctgtttttcacgatagcgttctcggcggcgccgttaacgttgtacataccgccgataagatgtttgacggtgtttgtggagacgatggaggagatgggaatggaaggtagggtttatagctggagactttttcctcgagccagaattgcttggtcaaggcttctcgattgcttcttctcctcttcacgtcctctctcttcttaaaaattatgttcgtctttcttctccttgtagatatatgttctccttaatttcccttcttgatatgtttttaatttgagatttaggtttttgggttttggttctgttgttgttgatcttaataaaatgattagagatggatctgaattctaatcttatctttattttaaacaaatcgttgtatgtgtaaaagtaagagattgaatcaaatttgcccagaattatatatctgagcaagataatcatctcgttagttacagttgaataaaatgaaattaacaaaagaatgaatcaatatagaaagaatttggtgaaggttttctagttggctaaagtgcaaggctttaagaaccagagaacgtccaatccccttgttgcttctttgctttctccactctttctgttcttttcttcttcagcttcatcttcctttctcttcaacacttcctgtgtacaaaaccacccaaatttgtttgttatgtttggttcttcttctttctctaattggtattgattagactagaagagtcggactttaaagcttgtatgtgtctgtttttagcagggaaaaggaaagtgttgattacataccgtaggtttggtcctcaagggtttcaatgtagctgtccggttctcagagaagcattgaggagatggtgggtttgtcctgatttgctgcaggaatcgttcgtgtcctttgttctttatagtctccagttttagaggaactgggatgttctctgcatcatccattctcctaaaaaaaatcctcacagaatccaaagtttagtactttacgcactaaactcatcaattgtatacatatctaaggctcaaacatataaaggaacttacttctttcttctaccctcctctcctttgttttttacagtctccacattaagtgagacaggaatgttctctgcatcatccactctcctgcaaatcatcattagaagtttagtaaagtcacttctatgtaggttgtgcataacactattttactgaaaaaatgacaaaacttacttctttcttctacggttctctttaaatgtgcttcctttaacatccgtggactcagggagcttatctttgcttacttcaagcagtggctttctttcctttttcaattccaagtcatgaacagagtaaggctgatttactatttcacccacttgatgactctccttcacttcagatttcccagtatcttctctctcagtaacccttgtggctaatctcttcaattcatagcagaaatctgagatatgaccaaatatgtctctccctgaaaacagatttctagctgattgtgtgctctttagtcttggaacttctttattcatcttcttgacagaagttgatttaattgctgctctccatgattttgcttggtagcttggaggtgtggctaagttcgggttctgattttcactttcttggttgtttggagtagaaggtgataaagcatatcccctcctcctacaagtaaattgaaacagagtgtgaaccaaaaagcattcaaaggctatagcaaagaattgagattggagatccttaagttagagatcagtacctctgattctgctctgttagagtctcattcgtatccctcagacttggatgcttcgaaacagaaaacgcaggaaattattaaaggtgaaacctttgtgattgtcaagaaactgtaatttcatatctttatgaggaaacaagaaagtaaataagaagggagaaacaaaccttggaagaagtcggcgttgagaaaaagtcctcaggtctcttgggatgattacattctggagttgaagataaaaccagaatcagtaaagaacgatagaatagaagcagagatacaagaatagtttctttatttaccaggtttgcagaaccaagcatcgtcgtcaatggagtcaaaatgggtaggggccaagaaatcgaaccatttaggagctctgatgtgttcgtaaaaaacgtcttcaacaaaacgagaatcgattctcttccaatcgatatgagcaggctccatgagagaagaatacacagagatacagagagaaaggatggagttgttggttggagagaaaaagaaaaggagaagacgaatgtaaccgttgtagtgaacgttacaggtccatgtggacacgtggctttctcttgttaccgttgcagctttatttaataacactagccaatccacgtggaaaaagaaacgagacgtgggaagggaatgaatgagtttctttattacgggccataaacgagcttattgggccataactgatctgagttcaggctgcattgggtcggaccagcgagttatccgctccaacaacttgataacgggtcgggtctcccagcaaaagcttctcgggtaagcctccactgaaacttgaaaatttataagtcgcatctcaacgcgcgaaaattccgaaattatagagggaaaatcaccgcgacaatctaaaattttggacactcaaaatcccaaattagtcttgttgctttcatcaccggaatcactcaagcttcttcgatctctctcgcgtcgtttcgtttccaaatgttagttttcttctattcattttttctttaaagttgttacacagatctcaaaactagatcgaattgtaagaaatcgaaatttattgtaatgtttaggtaggagaaaacccagttattgaatcgttgaattgagtccatttacgttttctgattacagcttgaagatgggagatgaaactgttgacggtatcgaagccaagtatatatctggtctcagtactataatggttgctacaattcaagaagccaaggatagaatttctcagatcgagtatattttttgtagccagttatttccaaattttcaatccaaatccaaagcttttgaaaaagtttattcagaagctcgtcttgctgcttgtgatacttggaaagatagagagaaaagtttgttagatcagattgaagagcttaaggtagagaatcaacagattaagtcagataaggagaagttagctgaagaacttggtaaaactgcttctatgcctcttagattgacgagtctacaaggctacatcgatcatttgaaaaagaagatgaagagtagatctaagatggttggtgatgcaagagatttgtattataggttagttgagttgttgcaggttaagggtttggatgagcttagcgaagatgggataaatatgattgtttcggaagtgaagagccttaagatgaagactgaatttcttcaggaggaactctcaaagaagacattggtgacggagaatctgctgaagaaactggagtacttgtctacagaagctgcagatggtgaaaggaagttgagcagcgttgaagaagagaaacaaagattgaagactaggttgcaggtttttgaggagaatgtcggtagacttgaagagatacttaggcaaaagaccgatgaggttgaggaaggaaagacagctcttgaggttttgcagggtaaactcaaattgaccgagagggaaatgttgaattgtaaacaaaagattgcagatcatgagaaagaaaagacagtggttatgggaaaagcaaaggatgatatgcagggcagacacggaagctacttggctgacttagaagctttacgttgccagagtgaagagaaatcatttgagttagctatggagataaagaaaaataaagaactctctcgtacttgcaaaaagtggaagtcccaacatacttttctctgcaaaaggtttaattttactcctgacagtgttcttcaccaaagcagccttgaggatgagaataaagaaattggtcagcatgagaaatcagcaatctcgagttgtaagtattagccgtctctgacctagactactttgaactacctctcgcgttaaattacttgctatagtcagtcatcctttagctgcaggtttcttattggtattagtaaactcacccagcttgattttttactctctctattacagatcttgaaaggaaacactcagaaactgctgaaggagcagacaaagtgagaattggtactggctcgagtggcaacaactatgagaaagagagtataatcaaaacagtgcagacacctatcacttccatctcaccaattgtgcggtcacctggtgctgcaaaacctccacagctaagcggattaaagcgtccagcttccatttggagagacacaagatctcgtcaatctcctggaggacatgatcctcatgatgattttctagatactcccattgagaatgtcaaaagggtcgctggggaagaaaaacatgttcatgatgttgctaagaaagatgattcagacgacgagacacaggacatgaatcctaaaccgagtccatcacgacagcgaattcaaattgcagaaacgagtaaaaagagtttcaagcatgtggagtcagtgaggaaaaaagccgagagggagaatttgaaaggtatagaatgtaaacaatgcaagaaattctatgatgctgttcatcctgagaatgaaggaaatggtaacaaaagcttgagatgtgaacatcatgaaggtgtgtcgaggcatcgttacagatacgctcctccaatgactcctgaagggttttggaacatcgggtttgaatccgaaatgtaattctgtatcttgacattctttgcatctacgttctttggatcgaaagactatacaataaagtttttctctgctttctcgaagaaaatgtcaactaaaactcttgtgataagttatttatcaatgatttaaagtcaattccctatgcttttgtgatcttcaagatacaatacaaacacattcatgctactaagatactaacttcaaatcttggcagatatcagctataactatatcaatatgaactgtttacgcatgaatcaatcatacaaacacaaaaagcataggaaattaatcatgcggtctagaaaaatgtgtaaatacaaacaaatatgggggggggatttattttagaaacattcgggctctttatgtaaatacaagaaaattatgtgtccaactgaaaacaacaaacaaatatgggcctcctttacgtgttatatattagatgcacaacaatcgacttttctgattacgattcaatcctctccgatcgttggcctcctgtttccgttttactcgacatcgttccgacgacttttgacctggaatcgacgcaggtaacaagatcgtaatctgttttttttgtctaattcggtttttcttcttctatggatcttaatttgataatttttgctttgtttccgagccgattgaattgttgtaacctaggtcttcctgccttttgcaatttcccttcttcgctcttagttgattctaggtttctgttggttaatttctgaagcttggttctgagatttctagatttgtttttccatcttaggcgtttgataggatataattgtgcttttcgtcgttctatggaatcgaggacgatgatgctccttttgtatttgattttattgaaaactaccagaagaatccgtatgctattgtattttcttttgagcttaaatagttatgttggttgctaaatagtttgagagcttatctgttcaacagtgacttcaattcaactattgcacttggtttgttggcaatggacaaaggagcacctcctagtatttttgtgaatgatgggtcattcatggaaagattcagacagcttcaacaggagaaagataaagacaaggataaggttgtccaagttgaggattctaagccggtgaagattatatcaaatcccaaacctgctgctaataaaatttccattggattaaagcccaatgatgcccagaagaaaggtggtaagcttgctttcagcttgaagcaaaagtctaagcttcttgcacctcctgtgaagcttggtacagaagaagatgaggatgatgaggatgttaaacatgaacaaggctttggatccgtaaagcgtcaaaagttagagcagagagacacacctgtaaagtcagcaaaagtatcggatgttggtaatgcctgtttatataaatatctttgttctttgtggaagtttctgtgttggttctacttatcttgcttttttatggttccatattctcgtatggggttctctgttccatttagtaagtgtaccatgagggttctgaacaattatgccatatgatgtcaagagtcccgagtttcatgtccattgcatgtatttagtaatgaatctgtgtgtcttaactgaaaatgaggaaggcctatgagtcctaaggtgtcaagagtatcatgtatgtcttaattgatgaagctgcgtttttccactggaatggagaggacaaaacagtgtggaaatttaattgtctacttaaatgcagtgtcttccttaaccaacaatccaattgctggaaagatttggaatatctcccacgcctgccacaagagtgatttgcattcattgttcatggactcggtattaatcagttttataagtgatatgcagcaccacctccgcccagtgatcctactgtgaagaaagttgctgataaactagcaagttttgttgctaagcatggaaggccatttgagcacattacacggcaaaagaatcctggggatacaccatttaagtatgtatttccttgtttcggagctgtttaacgtttctggattctctcttttatacacatactatgttggtacttgggttttattggcggtgttttttgaccttatgtatcttgtgtccatttttccaaccagatttctttttgacgagaactgtgcggactacaagtactatgtattcaggctggctgaagaggaaaaattaatttcacaaaccaaggattctggtgtacttcacagtggtaagtattagacaccatataattattttcagaatatgcttagccaagcatgtgcaaggaatatttggctcatttctttttactctccgaaaaatttctatcctacaatacgaatttatatgtgttctgtagtgtgagtgataatgtgaggctgctcttcctgctaccatattcttagcttcgatttccttcatttgtctttccaggtgatgcaggctcgcgaacgtccacagcagcaatccctttgcaaaagccagcttatcaacaaacaggatatcagatccctgcctcagctctctatgatactcctgtggaacctggagcttcttctagatctgctcaggcatcaattacaagacccagcgacagtatgttcattagccttatatcgatctaggttccttcctattactgatatctagttttgattgtgggttatatatgtctgatctgcaggtgactcctttagtgggccgaggggtgcagaccctctatcaatgatggagttttacatgaagaaggctgcccaagaagagaaaatgagacgtcctaggcagtcaaaagacgaaatgcctccaccagcttcccttcaaggcccatctggtgagaatgaatcctagtgctatttatggttttaggcagctgtaaggtcttatcgctcaaccatgtttgatttcagaaacttcctccacagaccctggaaagagaggtcatcacatgggtgattatatcccacttgaggagctagataagttcctttcaaagtgcaatgacgcagctgcacaaaaagccacaaaggaggctgctgagaaagcgaagatccaagcagataatgttggacataaactcttgtcaaaaatgggttggaaagaaggtgcttacttgcatcactctatctgtaaattggtgcccttgtttctttctgtatcttgtgcctttatggagacaaagagcttagaaaattggaggagtggattacaggtgaaggtataggaagctccagaaagggtatggcagaccctataatggcaggcgatgtaaagacaaacaacttgggagttggtgcttccgctccaggagaagtcaagcctgaggatgatatatacgagcagtacaagaagcggatgatgctgggttacaaacacagacccaatccactggtattttatccatctttagctccattctttttgtgatagcacttcttttactcaccatctgtctcaattgtactacagggaaatcccaggaaggcgtattactaaggatcaaatcaatgtgttatgcgcaattattatctttggttcacctcagcaccgtctgagctttgcttttctattataaagaatgttcaagcttttagattactgatatattgaagtgttggtatgcattgaatttgcgtttcagtgtgcaaatagatctctttgacagacatatcagttgaaatacaatggatttgttattgctaatgactgagattttgattcgattgtcataactttattaatgttttggaagtctgggacataatacactaagcagcaaggttattaaagagaaaggtaaatgaaaaaagaaaagaaaagaaagatgatatgtccttcctagttgatgatatcgcagggagggaaattagcagagcatctctgagggagctgaagagccatggagcggtcaatgccagagagtggaggtccattggcaaggaggcaaagacaaggacgaccaagtgtgacaacggcagagcaacatatctcggtcggtgggatcgggctaaaaggagcaactgctgctctacatggtatgagctgtaccagcgcggagaaaaatgtcctgctgcatcctcccacttcctcctcgggcaacattggtggtggaggtggttgttgcaggccctcttgctgcgctgcaacaatggtaagaacggttatggtcatgagcagcgtcattgccaacccaactctcatagctttcatcatcatgtaaacagcgatggtaatgagatgacgcaacaacgagatgctgctggtttatataccataccatataatgaaaggggtaacaatgtcatgccgtttcacacctctctcctacctcacaaccaaatagcctcacgattactccgtgtgtgtgtctccactgtccagagctttaatcttcgatcaaactcacaaaaattataacatatcaccggttcctcctagctacaaatattaaacccataataataatattgtggtcagtgattattctcacctactgtgggtatctaaaaacttgcttaaaattctgatgatttgcaataaatttcgcatctttcccgctttaaaaaagcccaaacaaagcccattagaaacccaaaaaggagggattggtttgttattctctgtatctctctcctagtattcagctctaacacatagagaggagtcagaatatcatcagccgcctctttcacttcaaccctccttaaacctcatctctttcctactccgccgctctctccgtcgtctctcccgttactccatttctctcgacccctccaggtaattccttttcagatcctctactagaccctttacttattttagtgaattggtctttctccatttccatctatcccttacgtatctgtgactttttccccccttttggattgtattcctcatcttcctctgtttccgtcaaatgaatgatctttctgaaattcaatcacttttgtatcgtttctgaatctttcctctaataggtgaaaatggctgggaagtcgaacaaatcgaaggccaagagagcggctcagagcactaccaccaattccactactgatgttaaatccgatgctcctgctcctcctgttgctgctactgttcctgctactgctccggttactgctgctgctgctccggttgctactgctgctgctccggttactgctcccgataatggcaccctcactgctgttgactctgcggtgcctgaagccaatgaagttgctcctacgattcctaaggctgacgaaagtgagtcacaagttgaaaataacgatgcccaacccaagcaaggttagctctaatgcttttattagtaaatcacccaattttttagtatatctcaatttgaagtgtcagtgtggttttctcgtaagctaagtagattcatccacaccctcttgtgtattgcttttaagtgtctaatttttctgctttcacaggtgaactccgtctttatcctgtgtctgtcaaaacacaaagtgggggtaaaatggagcttcaagtgagtttttttttttttttttttttttttttgctttctcgcttatatactattggctagtcttagaaaatcaaatagtgttttagtttcgtcagggatttaatacctgtagatatttcttgtaaagcattaccttttcctactggtttctcttatatatattggtgtaaattactaaatctgtccaatgtttgtgttttcagttgaaccctggagactctgtgatggatataaggcagttcctccttgatgctccagagacgtgctacttcacttgttatgagttgttactccgcaataaagatggagagactcatcatttggaagactacaatgagatctctgaagtagctgacatcaccattggtggttgctccttggaaatggttgcaggtagctaagtctgtcttttcttcatttttttgggttgagactaaaaacagaaagttgacttgttatgtttcttcccacagcattgtatgatgatagatctatcagagcgcatgttcaccgtgccagagatcttttgtctctttcaacacttcactcttctctatcaacaacacttgccttgcagtatgacgcagcactgaacaaagttcagaaccctggaggtttcaaatttgaatcattctcttaatattgttttgctttgctaatattttcatgcactgcgaaggatttatttatggcctctatattgaaacagataaaccaaagtctgacgttccagagctggaatgtttgggttttatggaagatgtgcctggctctctcaagaagttaataaattctacatcagaagagatcagatctgtggaaaacattgtgttctcatcgttcaaccctcctccaagccacagaaggtattgagcaacttattttagcatttgtaaaggcataaatttaccatttatgttgtttcttatgaatatatttgttgcaggcttgtaggagatctaatatatttagatgttgtgaccttggaaggtaacaagtactgcataacaggcacaaccaaaacattttatgttaattccagctcagggaatattctcgatccaagaccaagtaaatctggatttgaagcagctacgctgattggactattacaaaagcttagctctaagtttaaaaaaggtgggaaacagcttatacaccattcttcttaagtctattctttactctttttatgacgtgataatcattcaatctgttgattagcttctatttttccttttatttgaagctttccgtgaagtcatggaaaagaaagcctctgctcatccgtttgaaaatgttcaatcgcttttgccaccacactcatggctaagaacttatccagtacccggtgagtttaattttagtagcatttgaattgtcatccatcttgcacagacgtacttgtttattatagtatacttgcgttctgcacagtagtatggtttagtaccttaactctctcctttcgtggctatctcaactgttctttcagaggtctttactctgtgttattcagttttatgcactgataatggttctgagatattcatatggcagccatagaagtagtgtggttgaaggagtccttgtttttaattgcagaatatgcaatatatccttgaagtccctctctagtgcattctctttgtgactgccttttaatggccaagtcatatcttgcacaatctcgaataatattttattttattttttattatttatttatttatttatttatttttttatctcgaataatattcattttgatgtttttagtcttaacaaaattttgtaaattaattctcttaatagaatgtggtccatttcgttgcgtgtttattgactatgtactaattttctgttttatatattgaacgtgtgctttgtagctacacttgaattagtttttctattaaatctaagcacggaatgttgtatctggactcagatcacaagcgtgatgcagcgagagcagaagaagcacttaccatttcctatggtagtgagttaattggcatgcagagagattggaacgaagagttgcaatcttgcagagagttccctcacacttctcctcaagagaggtacaagcgatacctaactacaatgatttctcggtagcatgaaattttgagattctgttccatttcagatttgtttccttaattgaaaatttccttcgttgcaggatattacgagacagggcactttacaaagtgtcttctgattttgtcgatgcagcacttaacggagctattggagtaatcagccggtgtataccacccataaacccaactgatccagagtgtttgcacatgtcagtgtgaattgtttggcccttatttttgattctccgtgccaattcgtttattttattgatctagctaattgtgttcatgaaattttggcagtttagtaactccctttgtgttttataacgtggacaaatgacagaggatctagatgttcacatatttgtgtttatgcattgagtttttcaattctgaacacttgctattcttccactgttgtaggtatgtgcacaacaacatctttttcagttttgctgttgatgccgacattgaacagctctccaagaaacgtccatctaatcaaatgacggagaaggtgtcctcatctgaaaaggtttcatgcacagaaggaacctgcgataatgaagagcataacaactgtaatgaggcgccacttgttgagaatgagcaggctacgtatgcctctgcaaacaatgatttgaaaggcacaaaattatatcaagaagctgatgtcccagggctatataatctggcaatggccattattgattacagaggccatagggttgttgctcaggtttgttcaaatactggaacttccaagtccttattcttgagattgtctgtgtcttgcttgtgttcattttaatagtatctttgcaatgtgttttagagtgttctaccgggaatccttcaaggggataaatcagatgcgcttttgtacggttcagtcgacaatggcaagaaaatatgctggaatgaagattttcatgctaaggtaaatgaatatagtctcttgctgttggataccgtaggcattaatgtgaaaattctagtagtaatctatctgtacaatattaatattaatatttatctgtatactattataagactgcacgtgtcctagcagaaatatttgatcctgattaattccttcttcaggtgctagaggccgcaaagcttcttcacattaaggaacattctgttatcgatgcatccgaaactgtctttaagttggctgcaccagtagagtgcaaagggattgttgggagtgataacaggcattatctcttggacttgatgagagtgacacctcgtgatgccaattatacgggcccagagtcacgcttttgtgtcctaagaccagaactgatcacatcattttgccaggtacatattttctttattatttagaaaagtatgctcttgagttccattgacaacttattttcatcatgaaggccgaatcattggaaaaatcaaaatttaaaaccaaggctgatgaagggggcgatgattcttctaatgttagtgctgatacttctaaagttggtgatgcattgatcgatggagaggcaaatggggcttcaaattctgatcaggtatatgtttcactttttgatccggatagatatgtgcattaagcatatgtagtactgattgacgtttctatttcaactgggatttgtatgaatatttaggaatttacatctgcttgatataccctgctttttgtgttcaatggctgctattagtttatgtggatgctgtgtctcactatcagattttatagacgtagaatgtttgtcaaatgaaaaggcagactgacaaaaaccaaataggatatggaccctgtaacaatgatggaaataacaattttacttgtacattagtagatctctactaaattaatcaattggactgggtcttgcttgttcattcctctattgtttttgctttgagattctttttcccatcattgctttcgactgaatggatagaaatgtctgataacagttgtatctgaaaaaaactgtaactgctgatatctgcgttttctttacagaaatctatttcagacaagcaaaataccactgccgaagattatgcagccgggtcttctgaaagttccaaatcatgtgatcaaatagcatttaaccccaatgtcttcactgacttcacattaggtggcaatcaagaggtaggttatgttgcttataggttatatgttttaagatcatctcttaaaatttatttaactgattggatgaatcctttttgggttaaacaggagatagctgctgatgaagaaaatgtgaagaaagttagctcataccttgtggatgtggtccttccaaagtttatagaagatctttgcactctcgaagtttctccaatggatggtcagactttgacagaagcactccatgctcatggtgttaatgttcgttacattggaagagtaagtttgtcagctgtcgttatcattttgttagctatctctatgtttgagtttattaacagtagatttgctcgaccaggttgctaatggggtgaagcatttgcctcatttgtgggacctttgtctgaatgagattactgtaagatccgcaaagcacattttgaaggtaattttgactgttgtaaaagcatgccacaacaagagttagggtatctgtggacacgcttgtaataggttataatgttatttctatgttcttacgtcgttgtgcaggacattctaagagatatagaggatcacgatattggatcagcagtctcacatttcctcaattgtttctttggaaactatcaaactgctgggggaaaagctagcgccaacagctctactgccaaaaatcaaaagaaggttgtcgtgtactatcagagtttgtttattataattccatgtttgataatctttaattaggatattacagttctttggagccgtctagaaaagtttctgatgaaacaagtcatgctttttcttttattagtttaaggtgtgaaactaaacctttaatttggataggatcaacccatcaccaagaagggtcaaggaagagggaagggaaaagcttcttcaaagaaaagtttttcatcgtatatgatggttgactccaacattctatggtctgacattcaggaatttgccaaagcgaaatatgaggtaaactgtagtcattattaagctaagcatatttatttctaagccagttaaatgtttattactataagcacctaaagctaatgagagcctattttcagtttgagttgcccgagctatcaagaactaccgctaaaaaagtatctgttcttcgtaatctttgccaaaaggtaaataattatagacacattttcattcagaatttatttaccagggaatcctgattatgtcagttcataattgttattaatcacttcatttccctgttaacaggttggtgtcagtattgctgctcgcaaatacgacttcagtgcaaacacgccttttgagacgtcagatattttggatcttcggcccgtaattaagcactccgtccctgtatgctctgaggctaaagatcttgttgagatggggaaggtccaactggctgaggtaccttttgttatttcacactagctaacttttgcttgctaatttttgccaatatgtttgtactggataagatcaggagaaccttattgtgatatggattggcattcaactcttcaataagcatctcgttttagtttgcgaaagttgcattatgaatggttcttggtttagttttttatgtatgaaaatgattaaacttttgtagggcatgcttagtgaatcctacacgttcttttcagaggcattttcgatacttcaacaggtaagtaatctgtatacgcatctcgtcctgtcaaaataatttaacaccgaagtagctcatcatattctgattttaggtgactggtccaatgcacagggaagttgcaaactgctgcaggtatgcgtccgactgattttttgtttttctggaaaaatatccatgggctttcgttttagttgccttaagttttttgtcgtcttttgcttttcaggtacctggctatggttttgtaccatgcaggagatatggctggggccataatgcagcaacacaaggaactcattattaatgagcgatgccttggtttggaccatcctgatactgcccataggtatcaactatctttcttttatattaatgtactgtgatattgtactctcagctattgacttgcttcaaatgttttgatactgcagctatggcaatatggctcttttctaccatggactgaatcagacagaacttgctctacaaaacatgggtcgagccttgcttctacttggcctttcatctggccctgaccatccagatgttgcagctacatttataaatgttgccatgatgtatcaagacatgggcaaaatggacacagctctacgttatcttcaagaggctttgaagaaaaatgagagacttcttggtcctgaacacattcagactgcagtatgctaccacgctcttgccattgcgttcaactgtatgggtgcattcaagctctcacaccaggtactaaaactttcgtaaagtcttctagatcccacctttcgactctgttcttgtcaacatgagaactatatgtctcacctttcgacttaattgttctgttcttgtcagcatgagaagaaaacatacgacatacttgttaaacaattgggagacgatgattctaggacacgagactctctaaattggatgaagacgtttaagatgcgtgagcttcaggtttggtgcactgataatgactgaggagaacctcatttatctagtatacattttgtttggatttctcaaattttctggttgggttttgaatcagatgactgcacaaaagcagaaaggacaggcagctaatgcagccaacacgcaaaaggctatcgatctcctaaaggtatacttgcagctttagatttcggcatattttgctgaaaaggaataactcctctatctttgatgttgtagagttgaaataataatgaaatcgttttcctgattggtatacaataggcacatccagacctgatacatgcgttccaaaacgcagctgctactgggaggacaaatgcactgaactctgctgtccttggggagactcaaccacggggcagaggttttgatgaaagagcagctcgtgctgcagctgaagttaggaagaaagcagctgcaaaggggctactggttcgcccccagggtggtgttccagttcaagccatgccaccgctctctcagctccaaaacatgatcaataccgccacagtttcgtctgagaaaggtggagaaaacggggaggcaaaggtacaagagaagaaagaatcctctgaaaatgggaaaacagaaaacctggctcctgcaggattaggtgctggtttaacatctttggataagaagaagcaaaaagccaaaaaataagaaacagtaggatcttgaaggaaaatggtgctcaaagaaagtgcacgattctaagtagtgaagttggtttttgtctctggaagtcgataaaccacttgctgatttcattacatgacaacaacgcttttgtacgttaagctttgtttttcttcccattatgtcacaacgatttgggtaagtcccgcttccaggcatgtctggcttttttcttttttcttttcccctcacttttctgcgggtgtaattttataccacaaaaacgtcattgattttctagtaactccaataagctcacagttcacgcttatacctaaccttgcagccttactatttttttgtgctctatacaaaaatcttttacttggcttcttgtgtctctagagtctagactttagagggacactagattgaactcgactaacaacgaagaatcatggagtggatacatcaatttcgatcaaccattaatgatcatcacatacttcatttatgttcatcttccatcaatgatgaagatgaacagtggcctgtagtgatgttgtcactggccaaaacagtggtcaggcgtaacccgaacaagtacctaagtgtatatcaacccatttaagtttaagtctgcggcgtgagagacgggtaaatgggtaatgtttctaggcccaaattataggccttaataaggcccaattatccacacaggttagaagtgaggacggctaatggataatgttgacgacactcgcaacttcttccttatcgacacctacactctcctgctacaatggcgactttcctaacaaatgttgtttcaatcaaacctacaatcttctcattccagtccgaatccttcactcctttgcatacacgggtcaatgtattctcctcgaaaccctttccttctctcgctggaactttctcccggagctctagaacgagattcattccttatgctgtaacggagacggaagaaaaacccgccgctttggaccctagttcagaagctgccaggcgtgtgtatatcggtaacatacccaggacggtgaccaatgagcagctcactaaacttgttgaagaacacggtgctgttgaaaaagttcaggtttttattcataacatctccttcttctattatttcttagttagttatcatcaagatttgttatttgatgttgtgttgatatcatcaggtgatgtatgataagtattcaggaagaagccgtcgatttgggtttgctacaatgaaatcagttgaagatgctaatgctgtggttgagaaattgaatggcaatgtaagtttttgaacccttaactgcttcgttctatacattttagttctgaatatgacagagcttgtttttggtttctcagaccgttgaagggcgtgagataaaggttaacattacagagaaacctatagcatcatcacctgatttatcagttcttcagtctgaggattcagcatttgtagatagcccttacaaagtgtatgttgggaatctagcaaagactgttacaaaagagatgcttgagaatttgttttctgagaaagggaaagtagtaagtgctaaggtttcaagagtacctggaacttccaaatccaccgggtttggattcgttacgttttcttctgaagaagatgtggaagcagccattgttgctcttaacaattcggtaagtatctctcaactgttccatcttcttcgactatagagtgtgcataatctttttgtctcattttgttgttggttttaaaatgcagttgctggaaggacagaagattcgggtgaataaggcttagcctattggatcataaagaatgtgaaaagaatcgctttgaagagtttttgtaatgcaaatcattagagcttagtgtatcatcttgtattcattctaagttgaaaatgaaaccatatcttttcaaaagcttatagttgtggtaatcttgtttctaggcagtgtaaacagagaactccaatgacatgaacaagtcatgctacatccaattcagaggtagggatgataatgaagatccccaagctaaatttatctccaccaagtttcctttccataaatgtatcatacaatgtaaaattgctacttgtgtgacttgtgagctttggtcactcaaaatttcttaatttagtgtctacttctgtagctcttctgttgcttgttatgttgtaagttgattgcaaatttgcaacggtccttgttcgatgaggaagaaccagagcttcgagaagcacttgattctcattggactttcgttggcaaactgatcaaaatctcgaccaacggttcctcagaggtctcaagttcaaaactttttctctctgggtccttacttctaccttggaacaactgagtaccgatcttatctttaaatttcacggcgaaggattagaaataaagaaattacctttctttaactaaaaatcaagccagagatgcttagcttgcagtgtcttcctcctttcttcatctccgtcccaaatcggagcaccaattcttgctccacggctccacttcgtgcggtcagtgacttcgctgcttctccgtcgacctcaatctctcgccgtcttatccttctccgtcacgctcacagttcctgggatgatctttccctcagaggtactctgattctcctctttctcgctcaaaatcgaaaaatcaaatctttaatgtctctctttctctctgtctgtgtcttaacgatagaccatgatcgtcctctaagtaaaaccggagaagcagatgctgccaaagtagctcaaatcctctcctcactcggttggcttccccaacttattctctcaaggtaagttccttcttcaaattatcagttttgtttttcatttcgtgattgagaattgttgaaatcattcacttcacagcgacgccactcggactagagagacactgaagtcgatgcaggctcaagtagatgggtttatggaggcaaatgtacatttcattcctagcttttactccattgctgctatggatggccaaacagccgagcatcttcaaaacattatctccaaatattcaacccctgatatctccactatcatgttagtttctcatcaatcttttttgcttcatcttacttgtgctgtgttatcatttcttatttgattgatacatataggtgtatggggcataataagggttgggaagaagcagcttccatgctctctggagcttctattaagttgaaaacatgcaatgctgctttgcttcaggcttttggcaactcctgggaagaagtttgttgattcaatccttttttcagatatgcatgagctcgctttttctttgatttggagctaattctttcttttggccatcacaggcttttgcgctgtccgggcctggtggatggaaacttgagggtctagtggctccagatagtagcatctttgtgtaagagaatggaacattacaaagcttcaatttttagctttttccatggttgcaacttttgctcctacagtatgtcattcttcaacttcatgtctgttgcataatatatataaaaaggttgcaacgtctcatccttatgtgcataattaagctcagtttttagctactgaaacagatgagtaaatcaagagtagattgcgtctctttattgtttgtttaccttattaatgtaagatcctagcatcagggatatgttcaaatgcaatcacactatttgaataaattgtggattttgcattggtgggttattttattcatgttatcatacaattgttaactttgatgaatcctcagagattccatgggttgttatgtcttggagggtcaatgttttttagggctttccatacaacactattgcatttaaaccctgacccgaaaccgatttgccaaaccctatctcctcttttcatcttcgccttgtgttctaggtaagccagctcgtaccatatactgctgcttgatgtgttcccgaaacgctccaatgtccgtcttgatgcctccatattctcttctgtcaacttgagatccttatgaatgtcatcaagtactttcttactcgatgctaatacgcatatatgttcaaaggaaggctcaagacgaccaagcgttgcaatgtttgctttcagtgcatggcgcccaacttccattacatctctagatacatatagtccttgtttcccatctctgtcttctcttaactctatgctcttgtaacttgtgtcttccatgcctttatgggttcttactagctgttttattcaccagttacaatgtcatcagtcaaaacaaagaacagagcaagagtaaatcagagtgtttctttgttcttctcacctgcataagttggtatttggctcgccatctgtcgatacgccgactagatagcataactgcagctgctcccattcgaaagaagcaatttggtggaagcaacgcgacgtcattacctgagtaccaagtgaagcttactatctcagtgctcaccaccaaagcgtaagagccttgatgagcgtttaaaagatctttggctaaatcaatggctatgactccggcgctacaccccataccaccaagattgtagctctctgtgttatgcctcagcttataatggttaatcaccatggccgatagagatggcgtggtgttgaggactccgcagtttagcaccaggatcttgatatgcttcacattgattttggtcgctgcaagaagttcatcaattgctccaaagatcaccattgctgcttcttcacgaccatcacgaagattgaccctgtgaccaggcttgaagaccactctcggcatgtagctctcctctcctatccctgattggtccagcacttttctttgaagctcgatggcagtctcgttgaagttaccagacttcattgccagctcgatgaagtcgctttttgtgatctgtacaatttacatccacaaaacaacaatgagaagacagagaaagagagaagagaggtggggatggaagagacatgatgaccttgagatgatcgggtgggcggtaacaggagaaatcgagaagaaaaacagaggaaggagtaagataatgatagatgaggaggatgaagaaggtagacaaagggaaagccaagattgggagaaatcgagaaacaaagatgaagagaagaagaagaggaggaaggaagaaacaaaaggtacgtgagagagagagaaggtaaatgtatccaagcttgacatatctcaaattatatccgaggaaatcaggactgcccttaggtgactttgacttaactccaccattcaccatctttgttgcctctttttccattttcactaagcatcaaaaccttgtggtctctcaataaataatcaaataaatatgagtcagtgtaacagaaagatggcttctttgctgcatgttaccgttgaagtggcgggttttgctgcatcattcagttggtgtggtgtaactaaaccaatgctcggttcaggtaattaccatttttttgaccaatgagaagtaatctctcattctccaagcaataatcgataaattcatacaactgaaatccatcatctccgttgaaatgttcaagaagataatcagaattctgatgtttcatccctgattggactatatttgactcaaaccattatatgtaacctaaacattcaacacaaaaattgtacagcacatttcaaaccatattaagcttaccaactctcactaatgaaaactacaaaagtttaaccaacggatctctacaatgaattattactctgaccaaaacttcacaaaggctgtcacgaaagatttcagaactgccaagagaggatttgtttcttgtcttcccatattagattcccctttccacgattcactgaaaacaagaagaacgaaagctatgtgaaaaaggagacccaaacacaataccaacaacgctaaagcacaactgagacttcggagtgtgttcactcacggtttaattctgtttaatgttgcattgttttctttttgagagctggaactatctggagcatcaattttccctttttccatggttgccttcttctctacacttgcgacttcattcccggcatagctactcacagtgtccacttttgctctgtcgttcttacgacttcccgactgttacacagttaaaaggttacaaagttatcatccttttctagatttttcatgtgccaagtagtttaactcagtttttaagaacaatcaactaacagctccgcgtatattcagtttcaccttagttctcaaagttggaacatcaaaattgactaccaaaacatcttaaaacattcaagaggttgactattccatcattaacgtccttcagccactatgatgaaaaaccttatcctaaactcagataggaaaactaagagaatatttaggacaacctgtggaacacaaacataattcttgcatcgaacccatgaagattatctagttccagtatccaaatagaatttaaaaggcacacatataccagacgaagcttacctcagtgctagatgttggcattttctgttcagctgtcaaagttccattactaaattcctttgtctcatggacgttgccaatcacaccattcacaacaactgtctctttagcatcagcacattcaacatctactgaagcagaatttacaatttcctctccaactttcttttccatagggacagaaatatgatttggtatttgaccaacaatgacttccgtccctatgtcttcaagtacagcagatgaagtggatgatgaaatctccccaagatcaacatgatttactgtgctgcgatcagcttccacctccgtttcagttcctttcccaccctcacaaactttgttcaactcagtaggttgtgcatccggtgagtccatcgttgaagtcacagattttaatggaaacgtctcaacaactgtttctgctgacatatcaattgtgcctaatccgttcttaatttcggtcattgctgctcctgcatcattcactctatcgtcattgttaacaggctttgtgccgtctgattccatgaaacgaagttcctcaaatccttcgtctttgttatccacatcgagtcttttatcctgtggtttggtgtcaacgctatcgcacactgtctccattctattttgtagccctgcattactcttgatatcattgtcttcactgcaagatgttgcaagctgagtcatagatatgtcagtggagtccattgactggtgtacgagcccaatgtcttctttcaaaagttgacttccactcacttccctgcaattatccaagcaaacctggctaccgttaacgtttccctcaggtgactcagaagaaaaatcaagactttgatatgacccagaatgaaatccgtttggggacaaagataaagggggcacaggatccatcaggattgaacttgacagactttgatcttgcacagagccatttccctcaagtagcaagtcaccaggaccaaggactctattttcttggataatctctctaacaatctcccttatagtgtagaaagatccaccaacctccttgtgtgtgaggctaagtgaaggaaaactcccattgtttagtttctgatgcctgaaaacaaacactaattacaaaagctgggattgaaaagggaaaattcaaaattccggctaaggaagagaattaggtgcatacttctttataaaagattcaaccagtgtctttctctcttctttaggaatccgattacgagtcctcttgcctacagaatcgtgaggcttagctagagcaaatatttgcccaacgcaagtagtcttaagagagtgcatgttgtctctctctctttgtcctattatataatcctgtagcagaagagctaaagtgaaatcagaatcagacaacataacaagtctaccaaagaaacacaattcttaagacagatccgtttagttcattatttcgaaacagtaactgtctaaataacaaacaacaaaacgaagactctcaatcccagacaacacacacgaagagtgattcttatcatctgaggacaattgaattattgaaaagcaaaaacttcttcgataatgagaagagagatgcttatagtttgtagggtttacctgagactctgcaactgcgagaaaacgagagaggtcgatagattagaactcacgagtcatctttgcaaatggactcactaaaccctacgcagtacacagacacaacactgtctcagtgttgggaggcgcaagcgggaatttgggtaattatttcaacttttggggcaaaatcgtcatctttcttttctttatttatttccagttttgacccccaacacttttttttatcgatttagaccctcacaggttgaccactttcaaccaaagattacattttcatcaattttgaccaatcttcacatggtgaaagaatgtaattaagaaaaaacaaagattttaaactatatattatacttgaacatagtactactaacttcatgtttttttcttttgctgctataagcgtaactgtatgtattactaacatgaagcattttattgttactagtaagttgtacattcacatagtctagtcggatgctctcaactctcaaacttctgcctcagaacaagtctccaagaactggattagtttcgagcgttcttcctccaacagctcagggtcttcgctcgatagtctctcccgagttgtaccatccacacttgttggatcgtccactacctaattcattagtacacaacaacattacagcattaactcattcatcaaaacttgttcagctatatgttaagagacagagacatttttactttagcgtaattgttggtatggccgtctttgttaggtcctataaacggttcggcctcattgtgtgtccattcaccatctatgatgtatttatattcaaactgtccttcctgcatttcagaaattgtagtggttgttggaaaatgatcagacactatgcttaacagttaagaagaaaactcacaggcagttctctctttaggatccagaatcctgttcccttgtccagtgttagaggtatcctctacataaagagaaaaatggtaaaaacgaaaagagctaaagaaatacattaccttttatatatatacgtccaaatagttttgcacaatcataagacaataattttcagaaatccaacactcatctcttccacttcttatcaaagaggccattcttttaatagcagtgacaaaagtgcatcctggctttaaagcttatatggcacaccatagatttaagagcaaggtgtcataataaataaattggtttaagataaaatatatttacctgtccccatccaatgtcaaggccagaaatttctactctggagaaccccttatctttcagtgtcagagtaacagtcttcctcttgagtcctgtaagcttttatccatatacacccggaaacaataatcaggagtcaaggaaccaggtaactgttgcgcactcatgctaatcaatggaactgaggtttttcaaacataggaagcattgtgaaagttgaacgctgactcacaatatcaattgttgcatttctgatagcatccagcttcggaaagcacgaccttttgctctgcaagaaaatttcagaaatgttatataaaccaaatttacgcgtgcctttatgtttcaccagccatctagagatatcaaactaaaaatgtctaatgctagactattttggatgaactaacccaagatttttgtcttttaaagtgctatatcttcagtgtatatttactacaaacccctgacccaatggtctatgattctagttatcataattgtcggttcataggagaagaaggaaatccccaaacatcctcacataatataacaggcagtaacactagtaaaacatgattaacatgttggttacttaatataagtataaagaaacacatatagagaacataaaccacaagtaaattagtatcttaccataagtaatttatgagcttccataagcttatagccttgcacccagaacatgtatgtcaactgaaaatgaaattaatatcccttctcagtatcagtcagcaaaatgtgaaaacttgttcataccttcatgagtcaaccaaataagcacaaaattaagacaactactgtttgcaacagtcttacattttttcaatactggaaagaaaagggggaaaaagagaagagcttagtaacaggtttctgtaacataccgcaacagcaggagcccttcccattccagcagtgcagtgcacatatgtaactcctccatttcgcttaacagctttgtaaagagtaccaaccacggctggaagacgcattctcaaatcaaatgcatcaaagtctctgttacatcaatgatatataatatgtcaatcccctacgttgtgagtgggtacgtccatggtgaatttttctatgcatgtgctcgtgaacagtctcatatatgccaaaagggatgatgatggttccaagtctttagcagtaaagaaatttagtgagaatgggatgatgactaacttctacagttactctagtttgtaaacagacaaaggtggacgaacaaaaaagttagttgatagcagtgatttcacacccggtaaaaaaaaactatcactcacaattcgtcataaaccagttattgcttacacaaaagtgtgctgatttcccattagcttaggaaacgtgataaaagtaaagagcccaaagaaaaagaaagtataacacttcactgacaaaacaataagaatttaaagattgcgtgcctaaaagatatctgagactaccctccaacagtgtatatacctttgttccctcgcctattcagataattctggaaaaaaaactacctcatatgcttcttataaagtcaagcaataagaaaaatattggaaaggaaactaaaaatcaactcatgatctctccttcgattcattacgcatcagctttgaataccaatatattaaaaagtcacagctagatcgttgccttacctaatttcacagcgaatatgctgaatatcactatatttcttagcataggcttggatgctgcttatgtctactccaaaatatctggaaggattggtcaaggcattctgcactgcagatcattcttcctcactcaatgcgaaggaaagtgaaaacaaaatcataatcatgaacagaaaaagagggctttggaaggatactccaggtctggatcttgttgcaagcaaaatatggttttaactccaattttacgaagcttgtcaacatcttcaggggtctagcaataaaggagagcatacagtaagaacacgaggaaagtaccacatatccaaaacaaaatcatcatttgagagaaggatataaaagtgaacctgtaagcaggatccaacaattagatctggacgaataaagttgtagttcattcctaactcgtgcctgtaagttagaactgaaatgaaagacacatgagaatgaatcagtgactgaaatacataattaaggagaacaagaagataagtttgtcaataaacaagcaaaagatataagattccttggtagacagatgaacaaaactaatcaagatgaaagatgaaaaacaagagtagaatacaatccaatgagctaaatcaatatttccaatatgagacaaaaaatggtggacatcattagagtttccaatctaaggacatgtataggtatgatgaaaacaatttaccagcacccatagcttgagtcatgtcttggctatattcatcagatttctcttcatcctttgcaacaccactcatctctgagctggattttgactctgatactgcctacactcaaagcatttacaaaagtgtcaataaaagttagaagaaaaaaactgatataacaatatatcttaaaagaggtgtatacatgtaaaacaagtcgagattttggatcattggctttgatcggaggcgatattagcatcttcaaagaagaagaagaagaagaatgatctctttgaatgcacccgaatcccagcagaggtgagactgaacatctgaaataaatgacgatcaaagacatcaacaacacacaaattcatatcgaatcaaagaaccacacaaatcaacaacatttgctaatttcggaaagcaagaagatacctgggaagattctgaagacaattcatctttagagagagacagagagtgtagaaaaatatcagaggaagcaaacgaagctgctactttctcagtcccaagttcgacgatagataaaaaatctggtaattataataattttcaattcatgtccaaaaatgtttgtgagtgtgactctgacggtcacgcgactcacgacgatacaattgggaccccacggtctgcaccgggaatgcaatcacttttgtttgttacgtaaagtggaacacattactagaaaaagtctccaactttccacaataacaaaaacaccctcttcacaaaactaatatctgctgccacatcagcaccgtcaatattgaattgggttattctgtctaattatttttgttagaggttacttcatgaagataaaaagtgagaggttctatttttatatttctcaagagctaatgggaccactcatatgacgccatcacgtctcttattgttacaaaagatcttctctgcaattttaataatattttcagcacaagtaattagcaacagtaattgtctgtaaataaatcaattaatcaacaggtatttgtcagagcaaaatcagaagaaaggaaaaaaacaaaaaaaaacgctgcaacaagataaggaagaaagaagaaaaagcagaggaaagttacataatctttctataggtccaagttccacctactatgatcctcagaaggcgtggaggaggaacctccaaatagactaatctttggtcttttttgatcttttcccattggtaacttccaaaacgaatctgagttctcgaagaatacgtatgcagctatcactgatgccatgaacaagcaaaacagcagtgcatatatctgccactctgcacatcaaacaaatagataatagtgagaaacaaatgtataaaccccaaatatgtgccattcatattttcagagaaagagattagcaacaaacctttccactcctttggtacagtgagtttggtcaccatctctccccattcgctagaagttgtcagcataaccctagaaagaaccaattagataaagatcaacattagaaacaatgcggagacataagggttttgatttatcattatcctttcaattgcttccccatacctttcactggggcagaactcaagtgaagcaatggattgaccaagatgcagcctcttactgtagtggtagatttccattgtcttaacttcagcaacagatacatctccatctttcccacccctacaaaaataggtgcaaagtatgaggttttatgtacaatcacacaagcctgatagtgataagcagcccgggatgaagaaagactcacaaagcaatatatttcccgtccaagctcactgccattgtcgatgcagtcttccttgacagcttcttgaacccaagcttcttccatgtactaatgtcataaacattgaccataggcgtatcacctgattccaatagtttaagctttcatatgatgtttttaatttgaaatactagtgatgttactcgagagtcggatatattatatacctctttgagcagcacaaaacaaaaaaggttttgttccgtctttagagaaacggcacagttcaatattttcatcctgcagacatgacaatatcagaatcagtcaggatatatcagaagccaatataggaaacacgacagagacaaaatcgagaccgagaaatctcagaactatatttattggaaaagatcatagacatggaaactcatccttcatacaaatttcactggatcttattagtttagaaatataggaatgctaatgcaaactttaactctcacaatcacataccccactacgttccaaagtagacaaaggaaaaccatcttctgctttccatattctagctgatccatcagttgatgttgtagctaagaactctgagtcaagactacaaaaaaatatacaaatatgagaaagatgcacacaatgggtttcgtttcacaatctccattaattactatttgtgttgtataacccaattctcagctctatacagaagaccattttttactacctcaattacagttttgcattacaaataatataaaaggggggatggtggttgagaagattccagtatttacctaaaatccatgtcccggatggatttgtgtgcctttggctcatccaaaattacacttaggtttggccactccataattctaagacatccatcctgaaaataacttgtagtaagctacaactaaattgtcgcaacagtgaaagaaaaaaatcccttatattgcagttccttaccactcccccaacagctaatttagacccatcaaagctgaaggccatacacttttgtagtccagcattttggagaggaaggagttctttggctaagatcgtaatacctgttgctcctccgacaagctcaaataacctgaaaaccaaataaagttttaattaccatctagaccgtaaaacaaaatttgtatagacaatggggtagacagtgtccaaaaatggttgaagacaactcctcgtatccatgaaataagtggaatagtagagttgctaaagatgaatgcaagaaagggaagtcaaaatattatgaaagagaccaattataaaaggcatcggcaatctccaacaaaagtataggcatatataaaataaaccaaaccttaaacacaagaaattcaagcctcactacaattaattctacatcagcaaacatgggaggtgggagatcgtctgatgtaatgagagaagtaatgtaaagttctagtaatctgatatctagttctcatcataggtttaacaataccaactcaacaaatttagaaacatagtatcagaggaaggaactgtaggatgtctagtaatcataagttttgggtggtaaaagcagagatagaaacgtacttgcaaccacctttggaggttgagcaaacaaagtaatccccaccagggtgcactgaaacagccacaggatcaccatcactatccttaagcgtgtgtgttgcctttggtcaaagaaaaaagagaaaaaaggttggtttttttatttcattagtccacagaagtaaacaccaaaagaaaggggctttgctctgctttctcagaatcagaagaaaacaacttgaagaaccctagatttattgcatgattcagaagaacccaagtttcgcaatccaaagaactatagtagatttcaccctaaacccaataagatttcgaagctctcgattgaaaaattcaaaaggtgtaagaaaaatttaccaaaggagaggaggaaagagaagcagtaatggggtcaaaagagaagatgttgaggagagcaggagaagaaacagatgagccacggcgtttggaagctttagcgataagaacccagtttactttcttcgggcgacgaatccatgatccgcacacaacatgtccactttcacgactcgcttcttcaatctccattcgttgttggattgattgttattaatttcctctttggtctctccctaatttggatccttaatatatatatagacagaaaattgtttttttttgtgtgtgtgtgtagttgttgttccagagtagagaagaggaaaacagaaagtaaaacaaaaaccaaaaaggagttgactttggaaattggacagagagattttgttgagttattatataatgggattgaaaaatctcagatttaacaaacggacatttgcggtggtgggaaaggatattccttaagatccatgttccgatgccgaatttaatacaaacaagttaggtcacatcgtgcttccgtaatctatagcagactttcccattggtgtcaatctcgttgtttaaaaaaaaaagtaatattagaaaagattgaacgtaatctgaatattaagaaaaaggataaatatgaaaagatatgatgtaaatatgtaatcgatgcatactcttaattatgcaatgtaattctttttttgtgacattaatacattatatatcctttatcttataaaacacaagtcacttggcaaatcatgttttgacatgtggcaaatttatcaaaaacaaaatccacaatgtaaaacaaaaatgaatttttcgacaaaactcaaaataaaattaaatgtgaaaacagtgtacaaaattaaaacattatcgtcaattttcccacgatcactctcaaaagaaaataaaaatcaacccacatattctccatactcccacaatttctttttcttctattcaaactatgtaactcttttttttcaattaaaacattcaaactaactattgggaaacaaagacagatacgatctcaaacctatatatacaaatctcggtatcatctttctattgttgatattggtttttaaaagaaggttgagagtaaaatcatttaggagcgagaccttctttgtaacaagagtcttcaatctctaatcagttcatataaggcaatatggccagcgtatgttatatttcttttattttattgattgcgtttagatgagtatattaatgctttctgtttttgaattatcttttattatgtatgtttaatatctttttgcttcatagatcaaccactaaaaataaacaagcaaacttgatcgatagaggataaaacacaaacaaagtagaagacttgagcaagaaaaacaccaatggcaaagtagtaggaggttgaagacgaagtagaagtgtacaacattaagacataaatgatatcatctatgtattgagtcaacttcactctggtaacttttttttgtctatgactataatctatgtttgtattgagtctttgaataccatatgtaattttttattttatagcttttgtatgtattctagaaagcattgaagttggaagctaattctctatatttggaagactaataattttgtgatatcaacttcaattctccattatatatcaaattatcatctgaaaaaataaaatccacaaatacatgaaacgatatatttttccctacacgattatatactaatctatttataaaattaatttttcatgtataaatatcgataatatgtaacatatcataacatttaaattcaaaaaaagaatgtatcataacattaattttcggtgctatgcaccgggtataatactagttacaaataaagtataaaaggaattaaacttttatatagataattaacacaaacaaaatattagagacgatttcaaataaattatgaggatatagatgagaaaaatactatatagaataacaatagtaagaaattaaaaataaataaatcaatttgtacatataaattagaaagaaaaatatagataaataattaaacaatattaatagtatcacataggtcaattaaaattttatatacaatagttaaagagtattatatctcaaaactaagttttgatactgcgtagaacaaatcatgtttcaagcaaaaatgatcaaattcctatgatgctggaaatgcttgacgatccacatgagactggctatgtgcatgtatggagaaaaacgtgttgttcgacaacgcgtgcatgccttcttccacctaagtgacgacgcatcacaaaaagttatctagtagtgttaatagttcatgttccatctgccgaaattacacacaatataacgtattcgattatttgttatccaacaacttaaacgattcgaccaactcactcaaccttttgtcactagttccagtcatatatttcttataaatactcgttcactacatctgtacagatcgaaagaatctcttgatatattacaacacacccataattcataaagactagctcatatacctttgatatatgagatttgatctatatgtcgttctccttaactagatatcgctaattgggcttgcattcaacaagcaacatatatcgcttattacattcgacgatactcagcttctacatcttaagtctctctttttttctgagctcaccatcaagtataagaacacaattctacctcttatttgtctactcccaattttttgtttttggtttttcactattctgacatcttatcgtattatgattaacgttaagaatgtcgtctcgaaaatcacctacctagctattgtttcaagattcgactcccatgcgcgtcccatcaagaacaaaccatccagaagcatcaacctccaactattagagaataatgtcccattcgcccctcgctggtcaaatcgcttccatttgattcacataagtccaacaacaacgatgatctctggtgtactactaccaaaactcaaccttgagacagattctcaaaatactatatgttctattaactattttaacttgaatcaagttgataattgtagagagaaattttttgttcacttcttattaatttgtaaaacatttattttaaaacccattaccgttaagctttgatacaatgatacatgttattttctgattaaaaatggttataaacttgaacggtataagactttagtgtatagagaacaatttagagaatctgtatttatgtaaccgcgacctttcggaaacgtagaaggtggtcgcacaaacaaaccaatcaaacccttaatcgatggcactcttttaatgtctaataaacttcggttcgtcactcgaccggacaattaaatatgtgattaaaagtgtgaatttccggttcggtagagattactggtatttgttaatccgggccggaccgggccgtatctgaattatgaacactttcctaatgtcatagaatcgttcgtgccgtcgtcgctgcgatctgaccaaaatcaaaagtgttacgattcggtatcatcgtctctctcatttgtgattttgtcaaaccctgctctcttttctccaagtgctctcatggtgcttccgctcttccggcgcgctgcgatcgcccggacttcctcgcttctcagagctcgtcttttcgctcctgcctccgaattccattctcggtacgcttattctctctatctagtcccgcctctttcaaagtattttgatgttgctcttcttccatgtgtgatcctttgcaattcgatgactgaactgtttcttagttcgatttcattttccttttccgcaatcatccattgactttttttggagttcttattacgtattgtatagtgatgtttaagaatgccaaatttggttttgttggaacaattgaactatccattttttcttatcgaactggtagtacgggtttatcttctctagtttgtgagatgtaatttccattttacgtcactcgcagtgaagaacaagtgtgtccttaaactggtgtgatctctttacctttccaatacatttgacaatgaactttcttattcagcttttctaatggactataccacttggacgacaaaattagtagcagtaatggtgtgaggtatgtgttccatatcacaaattgaggacaagatttatttttatagaaaaagtcagtgtgatcgtaggcattcaaagtttaaggttataatttagttcgtttcgtatgtgttagattgttagtctagtttgagattttgtctgttctacattttcaggtctgcctctatagacttgattacaagaatggatgatagttctccaaagcccattgtaagtgaacagctagtactgtttcttttcttttttcactttcatctatccgtgtttctcacatacattgttttcttgtagctgcgatttggcgtgcaaaacttttcatctacaggtattcattgattgttatgtcatcttatggaataatgatcttcataaatgagtcaaccaagcaattccattatagaattactaaacgagttgattatgggactttcatctgatttgagcaacctgtcggcaattgttaaattgttttagccataagacttaccaacacagatgttaagtgggtgataagaataattaatggaaactttcgcttaacttgtagaaaaatagaaatgttaattgatgcaggtgcaaaaacttccatatcactcttttctctgatgtttgtgcttccatcataccttagatacagcgacaggagatgcaatcaattatacaagattcttccattaaattattattttctttgggttgtaggacccatatcacagacggttcttgcaatgccagccttgtctcctactatggtaggaaatttgacttcaatcttgtaaagaattttggcctcctccaagacatttggacttcaatcattgttttatgtttgttgggcttttgcagagtcatggaaatgttgtaaaatggatgaagaaagaaggtgacaaggtgggttatttcttatttttggttgacaaaatttcagtcgacttttatgattttgtctactaatgatcattatacaagaaagacgataaattgataatttagctggcaaagaaaatatagaatgtggaaattctcagtaacaggtatgaatttggttcttcctgacaggtagaggtgggtgatgtactatgtgagatagagacagacaaagccactgtagaatttgagagtcaagaggaagggtaattttgaaaaagacggttcatgattttatgttttgatttgtatttttatttcattataccttggtaattcaaatatctgactccctataagtatatgaaaatgtcaattggcttactatgaagcatggttctgcagatttctggccaagattttagtcactgaaggatcaaaggatatccctgttaatgaaccgattgcaataatggtaagcacagtggctgtcttatacatttatagaaaccaagtatgatctcacaaaaggtgatgcatgcatcaacatacgcttattaggagttcctgtttgtttatctagtctgctcttggcctctttcactttctttcgtttcctgggtttacattctggaagacttgacaaatcatagagatgtatggtatttcgttgtcaatatttattgtggaaaaatgtccaagatccaatctcatgctctcttcttctaaatatttccgtttgccatactgagttgtcatgttatgtccccaaacatgatatatcgtagggtttagggtgtagcgtatattggttacagttttggtcaacatcttgctacataaggttgatggataagagtttaatcttatctatttaattgtaaccaaggttgaggaggaagacgacattaaaaacgttcctgctaccatagagggtggacgagatggtaaagaggaaacatcagctcatcaagtgatgaaacctgacgaaagcacacaacaaaaaagttccattcagcccgatgcatcagatcttcccccacatgtcgtcttagaaatgccagcactttctcctacaatggtatgaaatttcatattttatgctagctttttttggaggagaaggcattcagctttctatcctaagactctgaattatttgtttattgatgtgcagaaccaaggtaatattgccaaatggtggaaaaaagagggtgacaaggttagtttctggtgacccgatgagtaaattggcattgtaatttcaccacaagaaatctgatgtttatgcacttgcctgtgttgattcttctcatttcatgaaacagattgaagtgggtgatgtcataggtgagatcgagactgacaaagccactctggaatttgaaagccttgaagaggggtataactaacatcttgtcgtcttatttctttttctaggcagtatgttgatgttcattctatatagcattcactatctgtggatattgcttcttttcttgtttggttaagtgagaagtaaatgttaattgcaaaaagtaaggtctctccaagtgttcccccttgaactgatagtgatttaaaaggttgatttcatgtttcgtagttttcatatgagtatgggcttcctctacaaaaactgatttcctggatcaaatgagtgaagttatataatagattctataacttgatggatgacttttgtgtaggtacttagctaagattctaattcctgaaggttccaaggatgtggcggtgggaaagccgattgccctaatagtaagtcttttagttcaaaagtacattgactgaattctttatgccagaaaactgtattacgactggtatatttaatccatttgttttactagcctgtgtgtaatgcattttgtgcataaattggtcgacactcttctagttccatgctacgttatatattgcctgaagtaaaagttatgcctgcacaaaaaatctttgaaaatacaattgcttgcagattgggggatataataagctaatcgttcttctctgtaggttgaagatgctgaaagtattgaagccatcaagtcttcttccgcaggtagttctgaggttgatacagttaaagaagtccctgacagtgttgtagataaacctacagagaggaaagcaggcttcacaaagatcagtcctgctgcaaagctattgattttagaacatggattggaggcatcatcaattgaggcatcgggtccctatggtacattattgaaatcagacgttgtggccgcaattgcttctggaaaagcttctaaatcatctgcgtctacgaagaagaagcaaccatcaaaggagaccccgtctaaatcctcctccacatcgaagccttctgtgacacagtcagataataattatgaagattttccaaatagtcaaattcgcaaggtaaattaacatatttattactctctatgtagaatgatgaaatatgtcctgctgcattctgttttactttccccacttggcagattatagcaaaacgtttattggaatcaaaacagaagataccccatttgtatttacaatcaggttggtgactcacaacctttgtattttctttgtgtattttatttgctgtttaagcattttattttgcctgcagatgttgtattggatcctcttcttgcatttagaaaagaacttcaaggtttgtagactgctcttatcacacatcctggtatttattaacaacttgagaggctcagagtgaactgtactttcatgatctacagaaaaccatggcgttaaagtgtctgtcaatgacatagttattaaagcagtggcagtcgcactgaggaatgtacgacaagctaatggtgagaaattattttctcctcgtaaatgatttcattaaaaataactaaactatggtttgttcccatccctaactatgcgctagattaaaaccttagttcatcctctttaaggaaactcggcttccatgttggattattcttgcaatgccgtttacctccgttgagagtatttagtaaagatgttttgagattgtaatactgtaacattcaatatgactggtaatgcattttagactcggttttagtcgttacaagtaggacattttttggtgtgagtttgatgtaatgatttgtggattggaatcgtgtggttgttttttctcttctgctttctcaaacctttcttatggttgcttaaagttctctttctcaatgtctggcagctttctgggatgctgagaaaggagatatcgttatgtgtgacagtgttgacatatcaattgcagttgcaactgagaaggtacacttgtgtgtttgattttctgatcatttcaacagtttatccctcatcatcttggcattttttgcagggcttaatgactccaattatcaagaatgcagaccagaaatctatttctgctatttccttagaggtaattttattctctctgaagttaaacgaatatggaaggctatagaggcacatatgtttgatcagttcttaccatattccatgtgttgttgatcgctatagttatgaattttaatatgtcaaatgatttttggatcaggttaaggagctggcacaaaaggctcgatctggaaagcttgctcctcatgagtttcaaggagggacattcaggtattcatcatttttaagttattaagcatagtacggaattatcaatcatgtgtaacttttcctacttaacgagaaaaccatactttatcgttttgcagcatatcaaatctaggaatgtatcctgtggataatttctgcgcaatcattaacccccctcaggtaatcatagccttaacgatgcaccctgaatcacagattgaagattaagttttgctgtttgtaatttgtggtgtagaggatttagtttaatatttatagagatgcagatgtgtttttttggataataaacttcaggactatcaattgtcttgcaggctgggattctagcagttggtagaggaaacaaagtggttgagccagttattggactagatggtgagctagtagaatccttttgggttttcaactagggttgctattctgatcatggtatgacaagttttcgtcattgtttcaggaattgagaagccttctgttgtgacaaaaatgaatgtaacgttatccgctgatcatcggatctttgatggacaagttggaggtaatggaacattcataaatcccttcgtttcgagttttatgttatgctgctgccatatttcactgtgtttctcctttgttactcattgctttttctatgaaaccggctttgtttcagcttcgtttatgtctgaattgcgttcaaactttgaggatgttcgaagacttcttctgtgagaaagatccaactgtttaccaaatgaatcttggattactacataataaacctcggaccaacccacgtgcacatccagaaccagaactgctggtctacattgttaactctgatcacatgtttcatttttttccatttggttcatatacttaccaaaatttgttttggtctttaacaattcgtcttatagattggtaacttcctgaggtattttttgtctggtctgtcctctgcaaaataaataatttcagctgtcaatccgcaactggtgaaataatttaaaaagtattttaccctcatcaaaatttttaaaatgagattattgccatctctgttctaccagatcttattgttgagctccaagaaacgatttatagacttatagtggttagtgttgaattcatccgttaagtctttaaccaagagattacaaaatttctatccaaaatttagggtttaagtaccattacaaaagaaggaaatatcagagatttgaaggtgatgtaggttaatcatctgaagtagtctaatgtcttgcaaattgtgttgtaatttgttctatatataaagtttttgcattttcggagaaataaagaaaaaaatgatcacaatacatccgaattgatagcatcgcattcgcataataaaaacttgtagaatgaaaaaatgaaaaatcacataatgaaacaagaaactatacgcttacttattagcataatatgcttttatttatatttttagacgtaagatctacattttcatgaatcttatgcatattttctcgattggttcttgcataatcgtattaaaaacccgttattcaaccattatccgtgttacgaataaagtatgaaatataaatgaaatatggaggcaacagaagaagaaaagtttaaatgtgtgtcaaaattgtaattttcagaacttcagccggagaagaaagacatgagcggcttcgtggtttcaaaaccggagcagagccatcatcgtctcttcgatttcgcaaagacggccataatcaacatcttcgcacatccttatgccactgtatctaacaaacccgcttcctctcaactccatttcatttacaaagtcttatcctttatgtctctctctctgcgtcttttctaggtttgcgaattgtactgtggcggagctcccgaaaccgacaagtgggaagctgctccgattggtcactacatcggaattggtattaatatactcttacttacatactcagtgttatatcagtacggcttcatcgaagattgataggtttgcgtttttttctatttgggggaagtagatacatcttctgggatttcttctgtacgagaagcttgggagagtcagaggaagaattacgatgtggaattctttgaagctgatccttccaaggcaaggcctttttttgtttttccatgtgtttcagctaaactaagtaatctggagcaaaagtcttagtttttgcttcattttgtgtcacaggatgattttgaaatccagctacagaagaaattggagcaggctgatttagtttcttgttggcgccatctccaggtttgagattttgtcgtttgttttctccgaaaaatgtagcatagcaaggatgtgatggtctaaaatcttctttatgtagttatgctttgaaactgaggagagtgcgagaagactcctaactaatgtagcatgtttactgaaaccagggggttattttttcggtatcactcctgactcgtctacgatttggtaatgatgttttctgtatcaatgcatcaacttcagcatttgattgcctatatattttgatcagttggactgcgctccttaacattctggtcaaacagggcaaagtaccagaaaaatgttgaagcataccacaacagaagcggtgcaaagcctaatgtatttccaaactacattcggtctgaaagttacatgatcactttcgaattggaggaagaaaagtgagcattttttatctgagataaattcattttgctatcaagttccttttgtgaacttggactgtttgtcattttcttctcagatttccgctgtttggaaagaggtaccagctgaaattttctggtgacaatgcttctgaagaccattgcttggttcacttcccaagcttaatcaggtgggttctcgggcaccatgatctcgcttttcttgtttagcaaaatgtaacactaattggatgatatgaaattaccatatcaacaatgtgcacttgttgaacttaaagcttgtatttattcttaaaactctttaagtaaacaagatttccattctactcgtgatattgcttctagttgagctacaaatgacatctagtttgtatatatctttcgagtcttggtcatctaacttattgttttggtgtttgctattcaggttagcgagggaagctggccttgaatttgtggaaattcaaagtttaacagatttttatgatgataacaggttcgaagtctcccatacttgtagattctcaatcttttatcatgagcttttgtatgtcatagttgctcctttcgaaggttgtattacaatgctgatgttgttcaactcttcttgtcagagcccagtttgcaagcttgctgatgaatgctggcccgaatttcgttgaccctaggggaaaacttcttccaagagcatttgatttgttaggtaaccttgccatcatattatgccatcttatcatatctaatctctagttttgatactttatatccttattttgcgcaggtctgtatgcaacattcatatttcagaagcctgacccagatatcgaacctcctctaacgaccccaataccttttgaaagctccaataatcatgatgaggcaagtacctttgtcttgtcatattctcgttctacacaagtataaataactctaaaatttccttttcacttgagaaaaagagtctggctatagctttagtatggactgtatagttttcagtttgtagcacaacagtgcttcagtctcagctccttgcccggatgttattgtagttgatccatttattaaattgtttttgacaactttgcagagagaattgccagttatcacggtgatcactgacgcaagtgcaccagcagaagatccatcacaaggactagggaagattgttgaacaaaaaggaatactgggaccaggccctgctgatttacgtttctctgaagcaatttgatgccttttattttaggaagatgtactgctttggtgatgtagtgaaagttgtttatcagtgccacagatgagctaaaacgagcgtctcggtttgttataatatcaaaccacatttttcatgtgttttaacaaacattttcaacaatgttcaacaacactttactccacgattcgtaaatgaaataagcaacagatttaaatcttgcagaagtggtagctggattttggtacctagccgaccactcttcctctgaagagcaaaatgttccatcctgggacaattcgcttcaatcagaatcagagtcatgccttctttttttctccttcttctctttcttgtgcttctttctatcatctgaatcacgagcgcttcgcttctcatgcctttcgcgtttttcacgcctatcatgtctttcttccttctctctctttgcaggtttcctttcctcacgcctatccttcttttggtccctctcaacatcatccggtccatcttcaacagttttgacccctgatgtatctgctggtaagcgtgctgaatctgcatcttctttctgagaggatgcaagggtgctcggatcttcccaaggtcgtggtgctctgtacagagttggagaaagacatgtgagacaagggacaaaggtaaactaccaataaaccataaagccaccaaaaacattaacatagttaaaaattagagttttttacgaaagaaaaagaacttacttagcatatccaagaccgtgaacccacacagcatcagcattccctgcacctaagtcctctgctgtcgaacccctcttcacaagttcagtaaactcttgcttatcaaggcgatttccttgtggccttgtagaggatttggtgccaagccaagagcctccctcatggcctgctcctcttgttccttaactctttgaatctcttctttcatagcatccatctcggaacccttttgctttttatctctagcataccaatgaagatctttacctattcagttggtgtacatggcaaatgaatgtcagtcaaaactcactaaactgaagattaatctacaaaaatctaaggcagtggatttatgaaaggagtaactaaagtaaaacaaccattgactgcccatactccaatgagattgaacagagcaatgaagcacaaaggaggattatatcgtcaagatgaaaactagttagcttacaaattaacaaccaccgagagtgtacataagaaaaagtacctttttgccatcttccaacaggggctttgatactgtgacccaaatagttctccctatatttatcagccttgacttcatcccaactgaattctgcacatttataaacaaattcaattagtaatagagttctcatcattagcagctcatgttctacatctttgatttgaaaactaattgccaaaaacgatctgttaattagaatgacaaagcttcttctgaatttcagcttctcccacaaattgcttatagacaattcaatcaaacactagatccaacaaaaaaaatcatcaaaatagcagagaagaacgaaaacgttggataatacataggaaccctaacagttgagaattttatgtaggatcttgtaattagaagcaaaatccaaaacgaattataatgaaacttacgatctcgaccaccgcgaacacctcccctcgttggatgatacatcgaaaccctgaaagttgcaaccttgatttttcctcaggaggctaaaagccagaactttgattggatacgaatttctcagatttttggttccaatggagtttaaataaaaacaaaaatacaaaaaacaaactgaagacggtgattattattatgggccaaataaggctttaggcccattagaggttaatagaaacaaaaacttgaaaagacacgtgtgacacgtgtcgtaagcaaagaaggagagaagtggagagaagtgaccaccagacaattgtaaagcctacctaatccacaccgattcaattcaaaaccctaaactcaaaatccgtctcggtggaggaaaaatggctgaagaagctcaagtagatcgttctaatggctctgattcatcatctcctcccataaagttacctcctttcatcaccaacctattcgcctttcttcaacctaagcctcctcctgctactattgatgccaatgctcctaaacctaccggcgagaaggaacctctgaaatcgacctacgagactgtcactttcccttacaatccacccaaaagcgcagagccaatcaagtttgaggctgagcccagctctggcaggacttccaactctgtcatcctttggcaggtgattttgttaagatgtttatattttagagggttctttgatgaaaaatgatttgaattggcttataatttggggtttggtgagaggtgctttgttatgttatttatgagaattgtagggacatggttgtttatggtagatgttcataattatgactctatgactcagattatcacttcctgtttactagaaactattctggctttttttctctatcaataggcaaatagttttcgatgttttcaatgtatttcattggttgcagtcagttgcagtgtgctacaatgaatgttgaaaatggtttcagtttttgttatgccttcgattcctggtaatgctttagatgacctctaacaattagcttgatgttctgtcgttcatggagtaggaagcatactatttttgctcctttcaattgcaagttttgtagtagtcagagctatcaaaggctgacttgatatatgaatagcatgactcgagaatcgagatgttttggttgtggtgtgctttattttctcatcaatggactcctgacgtatacgaaagagttttgttctgatgattgtttcaaatcctggaaaaagttggattctttcatggttaatttagtggagtattctctataactatttcaggtatatgcacttggagggtttcttgtcctgaagtgggcctgggcaagatggaatgaaaggaacgagagaagtgacaaaaaggaggcgacgggtgatgatgatcagaaagatgatgatgaggatgatcaatcatctgatgggcatgaagactagtcatattacttgaacacgatgaaaatgttacccactttggttctgtatagcaaaaacaccataaacttcaaaatgaagatttcttattttccattgtatgtacttgaatcttgagtctcatctccttatctaaggggactcgaaatctcttctcatgctggcaagaagttttttttttcttactggacaaatctcttgttgttgctgtgcagtgtctctttagttcgtgacttgtagttagatcattgctagttaagtttcaagagatttgtcatgttaaatatcataaaccgaacaaatgaacacacaaacattatcaacaaatgggatttcaacaaacggtcctataatgaccaagttatgaatcacatacataacttttgcctcttctatacagtattttgacgttacacaaagctgatattagtctacagtgtatataacaaccaccacactctacaaagatccaacaatcatatcacggcttcacaaggatcaacagaatcattctcgcctaaataagccatcatctgaaccactagtaggagacagcccaaacgggcgtgtgtaataaggagtcgaatacaattctctactgcttagaactgaatcaggatacaagcttcgagtaggtgtcacaggggtattatatgtacttgacgatacttggttaccttcaaaaccagatgttccaccagagattgcactgcctgaaactcttggtatgcctttattaagtctgaatcctggaacatcaaccatcggtggaccatctgccctgaagctggaccatagttttggtccaccgatgtatggggtggtcgaaagtcggtcatccactgacaaaggaggactggtttctagttggctttggaagccagtatttaggagattgtttgtggctgttctgctgaaaagctgatctccaggtactagggggacgtctcgctcaggcatatgggtaaccatggcgttctgagaactcgaagctagaaaagtgttcctatttgaagcatcagatgtaaaatcggtggggacacggaaaagtccagcagcacagataactggaaactctaccatggacccgacactggaagcagggagagatggtttagtactaaatgctggttccatcggtagtgcatatgtgttcatatatgaacctggtgttgaaggatatgagctttcagaatgacaatccgggtttctgatatgtaggctattgactttctcttgcagagacagcttcgcttgctttagtgcggtcagtacagtttcacaagtatcaggcttcacatctttcactgaaactaatggatcatctacttcatgaatggtagtggtagtactgccaaagaaaccacctctcgagtttggttgcgttacaggaggcgaccgaatagttgatgaagaatgctcattgatacctttactgctctgtggttgggaatactcacttgtagggctctcagaaatatgttttcctttgtctcgagaagaataagcatcttgttccacagatctggaaccacaactattgcagcacttatcaggtgacgttactgaattatcaggtgaaccatgcgacaaagtttcaaacgattctctaaagtcaacttcattagctatagaccttgtatcacggagtgaagggactactgtagaaccttgaagtggagattgagctttttctccgttactttcatccgtcacatctgaatggtttccaacgtcacataaatcctgaaagattggacaagaagtattgttcaggaattc

SEQ ID NO: 498 - DNA, 93443 bp, Arabidopsis thaliana
gaattctctgcgtccacgaaattcaaattcgaaaaccgaaacgcgtttaacgagtaaccaagcacgtcgatgccacgcgcccagaacggtttatcccctttcccactcggaatcagctcctctatcgccttacctaatcccaccgccgtctccgtcgccgccaccacgggaccgtttccgaaaccatcagccgccgtctctttcataaactctctcagaagcgtaaccgccgcagtacgatcgaccgccgccgtgttcagccgaaatgtgagtatccgttgctctccgtcgtcggttagatcgtagagactgacgataaacacgcgtgactcggatttgatccaacggtgtggattgatccacgtgtttttgttcatctcgtgttctaggatgattctgtgtggatcagcgcatggatcgtcgctgtctcggatgatctgagccgtagatacggaatcgaagggatggatttcgacgtgagaatcggcggcggacgtaacgacgaaggagaaggagttagcggatgcgtcgaaacggatgttggaacggagagtggggtggtaaatctggagtttgtcgagggtattttggagattttggagttttggtgttcgggaaagtaagagagctatgacggcgatacctgtgccgccgtcaatcgctctgcaccagctgtactcggttcctccgacgggtcgggtcatggatttgggtacccgatttggctcactcattatccttgagaaagaagagagattgttttcacttttttgggattttaagattttacttgtatcatatattgtcaggtgggtaaatatggggaagatacagtgacgtaccttttactcggttaagtgtaatttttccggtttatcaaccaaatagaaatgattttgcatttacgaatttagcgtctttaattttacgttgctcacgtttaggcaatactatataaacctctccctatattttaaggtcaaataattggatttttttttggttttttggaaaaggtttaagtggaactatttgttttactcatgcatactcactcagcttgcaacatatatggaatgtagattaataaagataaaacacacgagatgctctttaagaaacaacagtttgaacgatatgattctatagatagccttgaagagtactgtcaagtaatatctcttattcatatagatggtttggattttacactatagatagctctttagcagcgactctattgtcaaagaatcggattcaggcggcagaattttggttgacaagagatagattagcatcagtcaatcttccttagaagaatccatcaccatcctggcgacgtgggttatatagtatgtagagtacctaatggaaaactacaatatataattaaggacgtacgacctttcttgtgctgttatgtatttcgattggttctgcttagtgttttgatagatagatcatgggtggacttaattagtttagtgtaatactaactctcttctcctgctctccaattgacgtacccctaagtccagacaaatgtgaaacaacaaacgaaggaaaaaaaatagacaaaacaaaactctgatctaaaaccaaaattagttttatctactattttcctcgatattactattacttaccttaaaacaattgaccaaactatttgactttacaccttttcttttcttcgacaaaaccaataaaagaattgttaaaaatggattaaaaagacaacaaaagtaaattgattgcaaaccacattgtgtacttcttattttagcgtgagattaggattattttacggatccatattatcttcaaagtactctacttttccctcctcttttcttctatatcttttacgaaaactatatctttttcatcagagagttctttctcaaaaactatttacacatcaaaaataaaatcaaaataaattgttgtgatcatagagttctcttgcaccaatgagtgctccaaagtttggttatgtattactattgattgtattaatcaatattagcaataatggcgtcgatgcatttcacaaagttttcaagaaattgcaatcaaaatcgacatcattggagtcagtaagtcctcttcacagaaccgcttatcactttcaacctccccgccattggatcaacggtacaacatatgtgacatcttattcaagttcatatttattcaacttctattactagggttgtttatatcaaccaaaatacattgttctaacataaattccttgggtttgttgttttgccttcgttatggcattcttgactccaacagatccgaatggtaagtccattacaaatatttttccctttttataagttaatgacaaaaacattatatatatgattgcatgtaacaatattcaaaaattgcaacagctccaatgctctacaagggagtttaccatctcttctaccaatacaatcccaaaggtgcggtttggggtaacattgtgtgggctcactcggtttctaaggacttgatcaattgggaagcccttgaaccagccatttacccatccaaatggttcgacatcaacggtacatggtccggttcagctacccacgtaccgggaaaaggaccggttatcctctacaccggtatcaccgagaaccagactcagattcaaaactacgccattccacaagatctttccgacccatacctcaagacatggataaagccagacgataaccccatcgtaaaacccgataatggcgagaacggatccgctttccgtgacccgaccacggcttggttcaacaaaaaagatgggtattggagaatgcttgttggctcaaagagaaagaacagaggaattgcttatatgtacaagagccgtgacttcaaaaaatgggtcaaaagcaaacgtcctatccactcaagaaagaaaaccggtatgtgggaatgtcccgatttcttcccggtatccgtaaccgacaagaaaaacggtttggacttcagctacgacggtccaaacgccaagcatgtgttgaaggttagtttggacttgaccagatacgagtactacactcttggaacgtatgacaccaagaaggatcgttacaggccagacggttacactcctgacggttgggatggtttgagatttgattatggtaactactatgcgtcaaagacattctttgatgacaagacgaacagaagaattctttgggggtgggccaatgaatccgacaccgttcaagatgataccgtgaagggttgggccggaattcagcttatcccaagaacaatcttgcttgactctagcggtaagcaactcgtgttttggcctattgaagagattgagtcattgagaggaaagaatgtccaaatgaccaaccagaaaatggagatgggccaacgctttgaggtccaaggaatcactcctgctcaggtggatgtggatgtgacattcaacgttggaaatctagagaaggccgaaaagtttgacgaaagcttcgcaactaaaccactagagttatgtaacttgaaaggttcgaatgtgaatggtggagttggtccttttggtttgatcacgttggctacatctgacttagaagaatacactcctgttttctttagagtcttcaaagatgccgcatccaacaagcctaaggttctcatgtgctctgacgccaagccgtatgttttcctaactcactaattcaattatttatatatgatttttgttaattacaatttgagagtgtctaacattaatcacaataaatcaacagttcgagtctcaaaaaagacaccgggactgacgccaaggagaggatgtacaaaccatcgtttgctggttttgtggatgtcggtctccttgacggaaagatctctctaaggagtttggtacgtcacaaacttaaatcattttactgaatattactcttgtatagagaagcaaataggtaacataattgagtgaatttgcagattgatcactcggttgtggagagctttggagcaaaaggaaagacagtgataacatctagagtgtatccgacaaaagcagtaggagaaaaagctcatttgtttgtctttaacaacggctcacaacctgtgaccgtagagagcctcaatgcatggaacatgcagaagcctctgaagatgaaccaaggtgcaaagtgatcacatcattctttaattttttcgttgacaaatttaattcattcgttaaaacagagagtctgtcacaatatattgtagaaaaaaggaacctattgtgtttcttttacaatcaatacaatttgtacatagtttatcactactaacaatgtattgatcttatattttattaatgaaacacgtctcctaatcacataaacggtcattatttcacgatacttgtatagattggaattaagcaagaatcttccgtaatcgattcagaataatagaaaaccaaatccttttactgacattatcttttaacatagaaagtcactgaaacaagaaaaacaaaccctatcaaagggaagacaacaaaaaaaagcaagcaagagatgggattcttgataagagtctctctacttgatcttcttcttaggcctcaactgcaaataaaaaaagtttgttcagatatcatttcagctgataaacaccaaaaagaaacaagtaacaaaaacaaacctggttgctgtgaccacacttcttcttcctgcagttgacagctcttgggtgaagacgagcatagcacctaccaaaagatgcgaaatttacattagaataatctcattgagacatcagatcggaccatagatgacaaactatccaacaaacaagatgtttcagcaatcaaaaatacaagcttcaacacattttcaaaaccatttgcaaaaatgtaccattcaagaaaatcatctggaaagatgagaaatttgaccagctgacaaagtttagagaatggaaatgtttgatattgggaacatttataacctcaacacgcattgtataaggcttgagaagctaagttaattcccattaaaacaactaaaaccctaacacactaataaacatttggtactttgaactattaatcaacaaaactacaatcttagggagaaattgaaacttacttgcggcaaatcatcttatcctgattgtacttacgagcaagcatcatcaaggaaggctcaataatacctcctctaagcctcaacacaagatgaagtgtagattctgtttacaaatgataacaatccattagagtttatacaatcagatcatcgaaatgatcaacagaaggattcggatgatttcgtacctttctggatgttgtagtcagccaaagtacggccatcttcgagctgctttccggcgaagatcaatctctgctgatccggagggattccttaaaggagaaacaagtaaatgataagagatctgaatttcaaaaagctaaagagaagaatccagattgagtgaggaagaatgataccttctttgtcttggatcttggccttgacattgtcgatggtgtcgctgctctcgacctcgagagtgatggtcttgccggtcaaggttttcacgaagatctgcatcttttgtgtttcgtcttctctcacgtagaaaccctaaacaaggaggaggcgggtttatatatgtcaatgtacgcgtctagggttttgctaatattgggctaggttacaggcctttaccacaaaaggcccagcccactttccaaatttgcatttctaccttatgccttgagatttgagtgggcttttaagataacattttagatatctctctcattaaaagaccacttctcgttagtcgaaggtttcatatgcacaaaacctatgagattgttggatcttggtcagggtctgatacatagagtagctataacaaatcgtttctatcattcccaaggtccaaagacactacatgattctaagatttatttgtcaaaaatttcaccttcttgctgatgatgaggcgattgacaagagctaaccaaaaaacagatccaaacttagctaagtctaagatggatattattagatccggataaaccggaagaaggtccgacaaaacggaaaaggagatccgatctaaatcggaaaacgaaatatgttacaaaacaaaaaaaacaaagatacattccggtcaaccggaaatcgaactttttctctctaaaagataaaggtgagataagagagagaaagtttgttttctaaaattctgtagtctatgttcaatttgtgaaatatcccgggatattacaaaattacaaccaaataaaaatattttatcaactccaatcaaagatttggcacctaagactttacaaaatcatacagcacaaattcaaggtttttttgtgagataaaatgactaccaatttttgaatatcttatggtcatacagaaaaagatccaaagctgttcagagttgagactataacaaagcatagtaattccaaaactcttttcaaactaagaaaaaacaaaatgaaacattgagaaagctacataaggagatccaacgagaggccaaataactcagagcctccttcctcttcttccaccctttctgcgggtactgtcggttgggattggagtcacatcctctgaggaaaacaagaacaatgtcagagatttattcaatcaaagatgcaattaaacaattacagttgaagattgctgctgttttaccaatgcgaccaattttcatgccagaacgggcaagggctcttagagcagactgagcaccaggtccaggggtcttggtcttgttaccaccagtggcacggagtttcacatgtatggcagtgattccaagttcctgtgttgcataaatatattcaccaaatcgattaaatatagaaacataaaagattatcaagttgtctgcttggtaatgcaatttctttgcctttaccttgcatcgctgagcaacatcttgtgccgcaagcatagcagcataaggtgaggactcatctctgtcggctttcaccttcattccacctacagaagtaggaaatcgaaacagcaattttagcaacccattgttatttaagaacaatgcaatttccaaacagataaacaaaaggaattcctcaaaagttaaacgaacaaagactaaagacacttcagctcacaccctatagagaagaccataatactaataacaatggtaactaacttagttctataagcaggaacattgatgccgtcaagaacaaagcaatttctataaagatatcaacggattcctcgaaaaaacttaaaagagcagatactaagcagaacctttaggcagtcaagaacttcatttcacactcaacagagactaccgcatacaagttaacaaagggatcatcaccaaaggattagagagtgagagttgaaagagatgattaccagtgatgcgaacaagtgtttcccgtccagacaaatcagtcacgtgctgcaattgcagatataagaagttcagaaatgtacataaaaatctaactttgcttgaaaaataaagaagccactcacaatgaaagtgtcgttgaatgaagcaaagacgtgaacaactccaaagacttgctctccttcacgaacagctggtccaagagtcacattctcaacctttggctctttggtctttctcttcgactacaaaaccaaacaaaaactagcattatgcatttgcaatatctaataaaaacttctcaatttgataactcaacgctagagccacacaaaaaaaatccaatgtctcagaaaattcatatgatctcagatcgaaattcgaagaataaggattgcttattaaacattttctcacttcagaccaccacacaataccagaaatggatttacagattatatatcttcttaatcactaaatccatgaaaattaattataagctttagacaaacttaccatggtttggaacagagagaggtacaaagggaagctagggtttcttttgttgttccgccttttacctttagctagcgaaagagacggatcagaatttgctttaatagtctgaatttttgttagggttaaagtagtgattttatggataatttaattgagacccaatatatatacagacccaacatattacggcccataaaagtgagcaaaagtgctagtttttgagcatcttggatttttaatcgtctctagtcttcttactggtgttgtgcctcgtactaacgtagcagtcattgtctttcaaatcttgtgtataaagttatgaatgtgataagtttattgatgttattagatcctcctaaacgtttgtacattgttgaaaggatatgctaatgcaaaattaggaaacacaaacgggaaaaaccgcgcatcgtcaaaatagttgcgattggatttgctatttctgcatatagatactgaacaggagtgaaattgtaagcaaagactaatgccattttcgtagcgcatcgtctactcgtgtggggagaagaagttgggactcacaatctctaggagtccctttggattgtctgtgtgtacccaatggccagagttacgaagaagatgagtcgcaaccttcccttcggctacattctgtctctggttagctattgtttcaagccgcttggttgtatcgttgtcccatcggtcactcttttctgcaatcacaaaatttatctctgtctcttttggcgggttctctagcaaagaccagtaagaagtctctctgcagtaggaaagtaaaaagtcaaaatctcgaggaaggttcataatataatcatagtcattggttcttaggaagggaaataaacctgtaagagttgaacatttggacagctccgtcaaggttaaaggtccatgtctctgagtctccagatctcttgagattgctgccaatccactcggataatgatcttgaaaacccaagttcgaccatacgatcaacaagccacctagaatcagaaaacaatgtttgagtgacaccaaggttggattctatactctgcaagctgaaatgagcctcatttatatatgtaacataatcagctagaagcgatcatataagcatgctctttattcccacttatctaaatcttaaaaatgtcctagaatccgcagtaacagctcaatcagagagatggtatacttatacaccaactatactaacgttcactcgagatttcatatgcgggaatcaatttggaattcctaagctaaaacaaagagtccagagtgtagataattagacaaacaccaagaaccacataaagaatgagactttacttgcgagaagggattgatgaaggtaaactctgcaaagtcttcagaactttctctacttcaccatcacttttttctgccttgacttccccagggacagagtctagtacccatagctgttctgcaccaaacaacctttgctatggtcatcatcatcattatcagattaaaagatcacaaatattgcatctcacaacaacaatgagctcttaaacttgcatacatgataagaattcacaaggtgaagtaactttggtccagtacctgtttaggaggagaagcagattcaccaaaatcaccacgagcacaactctccatgaactgcaacgccactttacctcccaaagagtgaccaatgaccacatcaggccaattccagccacttgctttaaccaaatcagctaaatccttagctgaattcacaagatcatgaggcggattaagcccttccacttccgcagatctcccatggttcctcagatcaaccaatatcatcttccaatctgaatgtacacacacaagaaatttcaatcgatatatcaaatgaaaagctcaagatactaatcacagagagaagcgtaccagaagcagaggagacggagagagatgatgcaagggagcgagaaaacgatctccagttgcgaccggaaccgaggaggccatgaaggatgagagctgtagattcagactcccgatcaccggaggttcggacttcttcgtaggctagggtttgaagagatctggaactcgtgaaacaagaggcgaatagagtcggagattcaaggaaacgaatcaaaaagcgagattcaaatcggttcgttataattctcgttctcgccattgattcttcttctttggtagcttcgaatctctccggcgaagtaaataaaacgaaggaacaaaagaaaaaaaaggaattgacagctgtgggatttgaacccacgccctttcggaccagagcctaaatctggcgccttagaccactcggccaaactgtcagatgtttatatgactctttaagtttaatttagtacttacaattcagattcagacttcaaaattgtacaattaaaaattatttaaattgttaaaatggtgtatttatcatttttaatttcaatggtgtaatttagcatgcatacaagttgatagtaattgatgaacccacgtaaacattattaatctatgcgaatattgacccgagaaaaaagactaattgaaccatgaaactatacgaatacattgcatatataaatcatctgaaaaatcatccaaaagtctagcccaccaagatacaagctgcaaatttttattaatattgtgatttctaaagatgtatattgattttattatagttcaatagttgacgttgcatgtctatttgttaatgtagatgtcatagcaaaaacaaagaaacattattgttccaaaagtctaaaacaaattattgaatgaagaatcaagttgatgaagaagagatgatcttgaacaagcgagagctttaattgaaaaacggataatgcggtatgtcacttatcgttatgtaatttatttagatttaattttccgtataatgaggaataaaaagtccaaagagagtgtttggacagtgctacaagaaaacttcaaaccagaacaagacaattatagacatcgatcctcttccataatcaatgaaagcaatctataggtttttgatgcttttattcatttgtgcaaagggaagaagaaacctttcacatgattgatacaagctcatgcatatagaaacggtttacggttctgactacaaaaaccaaccaatcttgaaatgaataagttttggagaaagggcttgcattaaacaagatatacaacttaattggtttttatgctcaagcgtagcttcatctcacttggaatcaaattcgatcttcttagtatataacttaactcgattagtagcgattacttgaaaaatattagagaaacagattccagaagttatctccttcactcttcagattcgtaatgaatgtgattaagataacaaaagaaaagtaaacaaatggtagtatcaactaaaagctaccattaaattccattaaatagcttcacatgggatataactgatgctgaggtattagattttatggaaggtcaatggtagtatttgacattttgttatataattattttattttctgctaaaacaacatattcctagcttttttatattcttataatcttgtgaagcaaattcaaaaattaaagaggccactttcacaaatcatcccagtttaggctgttgtataattgccattaaagttttgaaaccctgttgcataactgtcgttaaattttttagtctataaatcattttaaatttgattgtcctcttaattgtgaaacatttaatacacgagagattcctaagttattaacagctatattatgtcctcgtgaggtctgtattttagttattggcctcttgtattaaattctagtaactgtttgtttcattttttttaatttgttactctttcgtttgctattcaaagttctaaaattcaaacgttatccctctagcttctcaaataatatatataggagattttatataattatgaaaattctacttcaaatgacggtttaaaacgcaagttacaaacgtctgtttaattgatcataataaacattttgagagtactaatcaataaatcatactcatatccagttactttccattgttcaaatgaaaatcaatggctatcttgatcgtaacaatttagaaaaatgaaagttatgcaaatatgtgaaacattaaaagtacagtaataaagtttattgtaccataacctttcgtccaaataatttcctgttttaaaataaaaagacaggaaattaaagtcaagtaatttaactaccatcattagattaatcaaaggaaatgttttttttaaaaacattaatggatatccttttattcttctaaattattgctaaacattttgtgataatttttacaatgactagtgaatctggtagttagaaacatcttaatggttttcacctttgaatatccaatttaactaccagcaagcactacttacatacatctatctacatctttcattcttttatattgtcaaaatttgtcaccaccaaaaacattgatttatattcaaaatttggaaagtaactcaaagtagttgagttttgtgggtaccttcagaatgtccatttgattatcaatcaaaaagaagtttttagctggcgcatgaaaccgtcgttggaaactttgaaacggatgcttcactgtataaacgtactattattatttaatttttaataacgaaaagtaaattgtagatgaattctttttatttgattcatttttagttagtgctagccattatttctatctttaactatattcaaaattgttttttcatactataaactattattagaccattttcttgaatgaaccatactttctagacactatttctaaaatgactataaatcacaccatgtagttctatatttgtattattgtagtttattgatttaacattgaaaatttaataaattatacaattaaaaaattaataggttttaatacgtgtaaaattataaaacaaaatttataatgaaacagagagaatagtaaaaacatttatgagaaaaatatgtattggtgtcactaaagttattttagacatattttcattcaagaaatcagttgaataatagtcttactgtgacaaacaatttaatagataaaacattgagtagtattaactaataaatgaatcaaacaaacaaagtctaattgataaaatacgccatataaataaactataagtttctttaaaatatacattaaatatacaaaacgacaaatttatgaaacaaaaaagtgaagtcataagattaaaactattgtgaaatggatgacaaattcagtttcttctttattctttaaaccctaagtttaaattctttcaaacacaaatcgtagtatttgtaaaactgttattttcttgaaatataatttaacgttacattaacaaatcaaatggatgacatattacttaaaatttagattaccaataaaaaatcataaattcttcttttaaattgtaagatttaagtcttcccctttacatttagcaataaatagtttgctgcactggtttaaatgcactaatgcattgtttactgaattgtcttttgtttcatatatttgtctctactatacttttactaactttcccacctccaattaaaaaaattattacgaaataaacaaagtcatatctctctccacaacataattactttattcaacaaatattaattcctagtcatattttagctcctcttcttccttatatattacatacatacattttctttagaagtcattaccatcaacccatcccctagaaaaacacagagaaaaacaaatacaagaatacaaaaaccctctcgacgaaaccgaagtatcgaaatgagaaacaagaatggtaaaagaggtagcgttgagccctcggcgaggaccgtggcgtcggtggttgctaatgggaggtttgaaggaagatcaccatcgagcgacacatcatcatcacaaaactcgtgcctgacgaggacggaggaagtgaaggaggaggttgcatcgtcgtgggttgatgaagaagaggcgccggagatggtggtgatgggatgtcgaagttgtatgatgtatgttatggtcttacaagaacgtcaacgttgccccaagtgcaaatgcaccgacttgatcttcttttagagaatttgttttaagttattattcaatttggacttttgagtttgagatgatgaatttaattttctttgtaaagtcctctatataaatcatattgtttaaattataatctctattttaatatgttaaattgacagacagatcatttctgtttgtggccgtccctcttggttcattttgttaagttgtccattttcatgttttagtactatggaagccaatgacatgaacgaggatggattttcatcggagttgaattcgattgtttcaaacgctagttatggcgtttgcgtttatatttatttatttgtatactccagagaaacatagtttttcaatgtaaatgaaaaacgccaaaaaaaatagaaagtttatttttaaaaattacaaaatataaatttaaacacaagtaaaaaaatcgacacgtctcgaattagggtcttaagaatcaaattggtagtatgctaataatggtattgctttggtttcatcggcattcaatccgatgaaattttcaataattaaggttaaaagttgtatcttcatcaattaaaacgttatttattcaaaacaattcaccatcaaattcaataaaatttaagaacttttacaaacttcaaatattaaattatttaagaaaatatttttaaacctaaatttagtgaaaaagtagcaactaaaatttgttttaatgtattttatgacatttttctatttataagtactaaattttcaaaaatctaataaataattaatttctgtttttcatatatattaaggcacatgcgacgacatatatacgtgacaacattttatcctaaagttttaacatgatttttgaaaaagaaatttacattttacgataatttagttgcaaatcaagcgagttttaatatttcaataattttcatgtatatagaaattttgcattgctagttaaaataataacaaatagatgttgtcaaaactcgaaaataaaaggggtgtttctgtagttatcataatttaaggaattatatgatagaaaaacaaatttgggcggtaaatttgaaaaaaataactttttccagtctccccaaaagtacccgatttgccaaatttgaccctcccattttagctttctgtctattcaccagattctctctattcgattctccctttacttcttctcgtctctcttctctgctcgtcagatctcaaaatcaatcggatatcgaaaccacaacttcatcaattatgactcttggctcaggaggatctagcgttgttggtataaaatttcgattctttcgggtttgttctcgttttttgattttgattctagggttttggaataatccctcgtttgtttttttttctctagggttttggtgaattcttcttttggttttattcgttttgatcaataggtgttgagatttctcataggttctatcgatctagtataaaaaattgtagctttgtctaaattgttcgcatatagcttgatctgaatcaatcaattttaacaaatcgctgagaatgatttgctgatgtctcaattcctgagatgggtttaaaatgctattcctgagtttcttattgtttctaagaccttagctaggaatgttttcatcttctctatagctcattgttaactttgttgagtgttatcttattttagtctttgtggataatgattaatatgatatgttctgttctctgctttgattaaaaaaagtgattgcttgttttcatttactgatatgaattgtttttgttacgcttgttattgcaatatagttccgaggaattttcggttgttggaggagcttgaacgtggggagaaaggtattggggatggaactgtgagctatggaatggatgatggagatgacatctatatgcgttcttggactggcaccatcatcggtcctcacaacgtagttatatctttttctttatctgctaacattctccttcgtcttcatatatgttaacaattgttttgagaagcatagattaatattatttgcatctcattgcttggaatacagaacatcaaaaccacattgttttctaggcattgatcttatcgacatacaatctcttaagctttatttgagcagattatgccattgttgcttttgcttgtagtaacagagataaattttatgtcacagactgttcatgaaggtagaatctatcagttgaagctcttttgtgacaaagattacccggagaaacctccaactgtccgattccattcacgtgtcaacatggcttgtgtcaaccacgaaacaggagtggtacgtataaactcaccaccgcccttcctttctctgttttgtttctttggatgctctgtaatttttttatgcgtatgtgtataggtggatcctaagaaatttgggctacttgcaaactggcaaagagagtacacaatggaggatatactggtacagttgaagaaggaaatgtctacgtcgcataaccgtaagcttgttcaacctccggaaggtacttgcttctagttacttctggaatcttcttctggtttgctagaaaatcattgccccttctaataccaaagtatgtatctgggggtcctccattgtcgttctcaacgcttttttttttttaattcatcaaaaaatggtctgtgtggatggtatggtgatgatgatgatgttgtccgattgatcatctgaagttttatcattgtgtgcaaatatcaaaaacagcttctcttcctcactccatgtgttcaatcttttgaatttaacattttgtgtcagccctttttttatatataaatgaaatctgctatatttaattggttatttgttatgtaatacaccaaggttaaaacaagaaagtatcataaaaaatcatgaatctttgtaatccgaactaatggaaaaagaagccatgaacagcttcgtaacccttatttttgtttctgtgattcatctaaagccaatgcttacggtgattaatagaacctttgaaaactaagtgttacttttttctacaattagcacacttcttattgatgatgatgcacgtcgatttgcatgtacttcttgatgttccgcgtcgtcgttcttgacatagaaacaatcattcttcgacatgtagacttctacttttaggacactgtttaacttgcttgtaagttgattacgagtggtcttaaccataaacggactccatgaaagttgattacgagtggtcttggaaaatcaacttattaaataaatgaaaaaagtggttgaacgtaattaaacctataacacatttacacattgctcagaagctcaattaatttatgtttcatcagatttcaagcccaaacattaacactcatggttggattgatccagcctggatcttatggtgataaatgttatctctgtagtttttttttctttttttcctttttattgtaaaatttcgtttttagaatggagaagaagaaaataatttttctttcacaatatacttatatgatatagttagagattataaaatgcgtttagtatagatatatttgacattcggttgcatgatgacaaaataaacaataaataaatgtggtggtgtcctaattaagaactttggatccaaacaacaacttataagtgggtgaaataattatatacatatagtcgaaagcaagtacattttaatttactataatagaaacattacatatttacatgtacattagcaacatatagaaatatgcttaaattgatattggaaaattagattccacgaaatgtagtgctatgtgaaaacttgcgtttcaaactttgcattatgtttaggatatatacgcataatcacaagccagttttcttaagtgaagttgtcaactaataaatatggtgacaccgtgaaattaaaagtggaagatatattgttacatccatattttaacatttgagtgtcgagtagctttaaaggaacattaaaaagaatataaattgtgataggtacggttattattatgtttaccagaattagacggaccgcagacgaatgggacaaattgttgttatggttgatagataaatatgtacgaccaaacttataagtaaaattatggatcagcatgtaatacggtcaatgatgttttctaaacccttgtttacttttaatcaaagttatacttttaggttcaacaataaatactaagtttctcattttgtatttatactcccctaagtatatttctcattttgaatccacccaaaaaataaaacgatagcaaacaacaaaggtggaaaaattatgaaagtcccatttttaaacaagagtttttcatcttcatgttattcaaattcaaattcatcatcatggggatggccttcttgtcaccaaaaccctagaactcaatctttcagaatcaccatcagcacaatcaacccttatgacgccgaagatgaagaggaggaggaggataaggaagagaaggagaaggaaaaaagggagaatgaaaaggaagaggaggaggaggaaaattcgcttcctggcatcatgattcctacatcatcatcctccatctcatccaccatcgacaccatagaagaggtgccggagaccgagtccatagagaatgtgatcaaagggataaaatcatcagaaagactcatctttgaacgtaaaggagaatcaaactctattcttgaagagatgaggaacaaggattcatgcacttgtccttggaatccatccacactttctctaatttcaagtggttcatggtggaggtggttgcggtacactcgcttcgctacatccaattgtatcgtgaaaactactgaatagatcattgatatatatactcgataatttgtgatgagataataagtaaacatgcactcgacggttgttcttggttagaacgcgagttacgtctagaatgattgatgcggacccaagagatcatcatcttatgttatgtggtcaattcttgaaatcttctttctttcttttccatgcgtgtgactcatgctgatatagctacggttcattttattaatttaatctatttattagttgttcctttatcaaataaaacaaaattttcttttacagaagcaagacagaagcatctcttataagagattagttccagtgattccatcactaatagtagctagtagtaaaaaaatatcaagagcttatactctataaataatatatatagatttgatgatggtaggtttatatgtattcttaagcctctcataacatgcatgcgttaatgtgcccatcatgaaaagtaagatcggaactcggaagctatggttttgaatctttcattgtaataattaatccttaatttcttccattttattagatatggataggttacgtattttcgtgggtggatcatatgcaagtatggcgtcgacaaagaccaaaaacaaaggatggttacacacttacacacgtacacagtctagactctagcgagagtcctgatttaacgaaaatagttatttgcaaataaatttcatcgtctaactgctatgtgatacaaatacaaaccaatagattgtacgacttggtcattaatcccattgtctttcgatacacatgactggatcactactggacacaaatcttgataaaaatctttttttgacgaaaactgcaacatgatcggtatagctgaaactgttgactgtttctatcactatcagcatatgactcttctgctgaaatttagtagttatatgcatgtaactgctaaaacagtgaataaaagtgaaagtatattaaaaaattaacattaggtttgtgggtgacacaagtctgacacagatttgtccatgaggaaatacgtgaagatagatatgtaagcatttagacttttgtctctctcttatttttgttgttggattcctctctcgcattttattgcagttgtattttcacttatttttaatcagataagtgataattaattataacaggttatagtcaactagttttgatcaattttggacctaaatggtcatttgttcaaatctctagtttccccatttttttctttccgttattcatttttcacacacttcaaatctcgaaaataaataccaacgttaaactatttgggttgggctcagatcaaaatttgtaacctaattttttttgttgatgtagatgaatcctaatttctttttgatgtagatcaatccaaatttcttttagatatattcgtattcaagccgtaccggccaagtcgatggccacgatgctttaactttgaaggtcctagacattaaagcagtatcagatttggtaaagagatgagaaagaattattataagaattcgggaaatgtttcagctgaagcgactaccacggaaattataaaactgtttagcatcgacgtcatatcttttgatagttagttggttccttcgactgttcgttgagtttattattctctttatattaattagttcgtgttatattttaaagtgtaggatacgtacacgtacatacctatatattaatatatgttttaaattcgttgttctcatttcaatttacaataattagatcttcgtactatatttaggtctaaaacattacgttacactaacactgaacatttattaaaaggtctatcttttatataatttaataaaaagactaccaatcaaaggtttggaatttggatgatggcttagtggtagtattagggataaattataatattatgatcatgatagctattttcggtaggtataggtatcaagtttcaattaactactttggcgatattgttgaattcattattttccaaaaaaaaaaagatattgctgaattcatttattttgaagatcgtttatgtcatgttgttgtatctatctatattaacagttgcctgtcaatctttaataggaacattaatcaaacattgatgttgattaactttggcagacactagttcagttacgttccatattcagatatacgaaattatttccatccattttctaaagttgatttttgttttttctgatattatcaaacaaggaaacattttaaatttcatattacagttttatcaatttcagataaagttacttaaatttaccataatatgcatgtatacgatcgtgtatttgatttgcaaacagtgacgaatttgtgtactactaacggaaaactatcaaatgcatgaaaaaaatagttaagttttgaagtgattttatatactttaaggactcatccatgtattaacaataaataaatttaatgtaatattttaagatttcaaatatatatagattttggatattcaaatatcaaaattgtacttacaaaaattgaatgatccccaaccaaacaacaataaatttggtgccaataattaaatacactaaccaaaaaaagttttaattcaaaaatcaaaataaataaaataaagtttcttttcttttccccacccatcctttcgtgcagcctctcctctcctctccttttcaaaagccttaaaatcttccttccctctctcaccattaattccataaatctcctataattttgaatccaaccccaaaagaaaagagaaatttacattcttgtcttgtcttattttttcagcaatcaaaaaggaaaatggtaaggaaaatgaaactcccatttctaaacaagaacacatcatcttcatcattttcttcaaattcatcatcttcttcctcttcgtggccatggccttcctctcatcaacaaaaccttaaaacaatatcttccaaagcttccttcatcgttaacaaacctaaagatgtctacgaacccgagccaccaccgagaagcttctcctcctccccctcctcctcctcctactcttccttctcctctacaagccatgctatagaaaatccaccagagatagagtctatagagaatgtgattaaaggactaaaatcatcgaagagactcatctttgaacggagaggaacatcgaactctatactcgaagaagctaccaagagagacgatcatgaagaagaagaggacggtttaatgctcttgtccttggagtcaaacgatccttacactgatttcaagaactcaatggaaaagatggttgaagtacacgtgcttcatcatgactggataagcctggagaaacttctcttttggttcttgaaagtcaacgtcaaggcaagccatagatacatcttcgccgcctttgtcgatttggtcttaaacttagcagtagggccttctaaagatgttgctggagaacctaattccgacgtcgtcgtggaggattctctttcatcttcgtggccggtctcgttgtactcgtcctccgatgagaattcgtcgacgtccgtacgattcttgccggagacttcgataggcgagaagggtagagacgtttgttgtttatcgtcgttgtttgagttagaagaaaagattaaagacaatattgatccaaatgattatgtatcttcttaatttcttcatttgataacctatggatactcaattcttctttttttcggaatattatggaagtaacatctattccacgtgtacatcttttgtagcacgagtcatgtgcagaatatcttttaatttagtgtaaacttttttcaacctaaaataaaaggctattgatcaacaaacactctccgagaactcttttatttgatgggctgaatagaaattataataatgggctaagggcctttggttttacagttgttatgtgtttagtagcaagacatcaaacattttatctaatattcacctgttaccatccaatgttaacactttactttcagtgtcagagttacaatcaataagctttcatgcccatataccaaaaaacaaccctttcccattccagtagtgcagtgcagtgtgcacgaatgtaacttctccattttgcttagcagctttggacagtgtactaaccacgtcaggaagacgcattctcaaatcaaatgcatcaaagcctctgttacatcaaagattacaatatgtgaagccctacgtttgtgagtgagtgtattcatggtgaaatttctcaatgcatgtactcgtgaacagtctcatatgtgaaaagggatggtgatggttccaagtatttagcagtaaaagacaatttgtgagaatgggatggtgacttaactttcaaaaaatttctagtttgccaacaaaaaaatacgttaattgatagcagtgatttgcacccctcgccgctcttcataaatcaattattgcttacactaaagtgtgcagagctctcatttaaaagtgattagagtagatagccccaagagaataagaaagtataacactttgctaaccagaaaaaattaggtattcaagatttattttccagcagccatctaaagatatcacaattataatagctaaatcctaagactatttgatgaactaacccaagctttaatcatttgagtgctatattttcagtatatattactacaaaacgtgatccagtggtctagaaatctaactatcataatcatcggtgcataggagaagaagcaaatccccaagcatcctcacataatatatagatatcaaggtaaccatgtagagagaacatagatcagaagtagaataagtaattcatgaacttccataagttttatagccttgcacccagaacatgtatgtcaactgaaactaaaactactcttctcaatgttagtcagccaaaagtcaacacttgttcattccttcattagtcaaccaaagaagtacaaatattaacacaactactgtttgcaacagtcttataaaccgaactaaaaaatgttgttttgatactggaaaccaatacatctacgctcatgaaagactcacaatgaaagatgtgctacaaaaataaaaagggagaaaaagagaagagacagtaacaggtttctgcaacataccgcaacagcaggagcccttcctattccagcagttcagtgcacgtatgtaacttgtccatttcgcttaatagctttgtacagtgtacaacacagggcaggaagacgtattctcaaatcaaatgcatcagagtctctgttacatcaaaagattttaatatgtcaagtcctaggttgtgacttgtgagtcttatgcatgctcctgaacaatctcatatatgtgaaacgataaaaggttccgagttctctagcagctaagacaattagtaagaacgggatcatgactaacttctgcaattactctcatttgcaaacagacaaagaggtaattgacaacagagattttccaacttgtggcaacaaaaagtcattcgctgttctgagctcccattatgtcaaagaaaagtggtaagaacaaagagccaagagagaaaagaaaaatgtaacacttgactgataaaccaataggaatttgaagctttcttgctctgaagaaaataaactccctacctcataggcttctcatcattcctatttaagcaaaaagaaaggtacactgaaacaggaactaaaaaatcaatcacaaaagttcacagccaaatcatcaaaaatcagaaaataaagcttgcattaccaaggccttaacagcgaatatgctgagtataaccacatttcttagcatatactgagtatcaccgcaatacaaacaaaatatggttttcaaccccaatgcagtaaacaagcagagaatataaaaagaacacagctccaagagattcaataattttaacagaatgataagaaaaaaacctataagaatgatcccaacaagtaagtctggacgaataaagttgtagttcattcctaacttgtgccagtaagttaaaactgaaatgaaaaatacacacaagaatcaatcagtgaccgaagtgcatagttaaaaggagaagaagaaagttgagtaagccaatgaataagcaaaaaagttaaggcagattgacaaaattactatagatgaaagaggaaaataaaagtagaatacaatctaatgaaccaaatcaattttgcaatatcattctaccaacggtagacaaaaacaggtaccgatagagtaagtaaacccataggttgaatcatatattgcctatactctaaagtatagtttcaataattattttttccttaagcccaataattaaccatttgttgcaagttgcaggctgcttcttctttagcaaaacagaggttgttgtcacgttgagatatacagctttatagcgtccctgattctattagcaccaagaagttagaaaatctcctattagttttcctgattaaagatatgaagggttttttcaaaacggagagtgagacaaggaaacattcagacaagaacgggagcttgttgcacgaggagctaatcgcgtgttcagatggtaaatacaatccaatccgaatgttttcgtctgatcaaattcttaaagcaacaaacaacttcgacgcagatcatatcatagcaaaagatagatttatatggtacaagggtactatagaagaacggagagtactcatcaagaaatgggaaggagattatgtccttttttcttctcctgaaaatgtttaccgcgatatagcggttttgtcgatgatgagcagtcacaagaacgttttgaagctgttgggttgctgtgtggagttttataaaccggttctggtttgtgagttagcagagaaaggacctctaaaactcgaggacatggacggtactccgttaccttggagtgcaaggttaaagatcgggaaggatattgcaaatgcggtagcttatcttcacacagcttttcctcgagtcataatcaacagggatgtaagacctcaaaacatattcttggacgaagatgggactgcgaagctctcttctttctgtttgagaatatcgatccctgagggagaatcatctgtgtatgatgataaagtagtttatggggtatccgttgatccggagtataatggaacaggtttagtttccgaaaagtttgatgtctatagctttggagttacaatgctgtttcttctaggcggagagcttggcctaacctggttatctgctatcattggggagtttggattcccatttcctggttgtggtgaagaattagcggatcagttcatgtatgtcatagattcaaacatatggaacggtgagagtgaagcatctgctgtgcaagtggaaacgttttttgggcttgctttgagatgtatcagattctggccaggacaagacgtgcttacaatgatcgatgtcgccaaagagcttaaggggatagaagaacttttcaaagcgtcttcatccgaacaggacaaagaacaaattgatcaagtcaactactctgtgtaaagtttgaaactctttccttgtaatgaatctttctctgttttcagatatctcttgctttgaataagtaatttatgaataggttgaatcatatgttacctaaaggcagattcattcattcatcggatttctcttctatccgtcgaaaactaatcatctcaaagttgaaaaccttgaatctaaaatcttttactgcctatactcaaaatctttttgacaagtttttttttttgacaagtttcatacaaaagcaatcaacaacactcaaattttgaagaaaaaaacgaatctagtcaaaagttctcttatgattcaacaactaccatatatcaaaaattatctcatgattaaaaaagaatcgaaagaagaacccatatctagataatttctgaaaagcaacaacatacctgggaaggttctgaaaacgaagctgctcttcttcagttttcctaattcgaggataaacattgtagagaaaaatataatgtgaaaaactgtggaaatattgtgagttatatggagggtaatattgtctttttatgttaaatgaataataaacagagagaaaaaatgaaaaaatcatgtatatataaaagtaaagtttcactaccttcctattggtccacttggcatctcaatttactattgtttcattttgaatttttgattattttttttgttttttaaattcaaaaataaatattaaaaatttatctaatcaaatcatagatataattacataaatatgtttgtgtcacagatttaatttaatttatgggtttaactgctctagtaatatcaagtgatttaattttaagaaagtaactcttttgagtagagagctctatacttctcacaaaatttcaaatagatatttactttcacctcacttttttttttatagatttacctctaattttttattatacattattgaatttatagtcaatatttaattatttttattagtatttatttcatacttcagttacagattttatgcatatatattaattgagtgtaaatattaaaattgagtgttattaatataagtaaatattaattttagttaaacattcacattatatttttcaacttagaaaaaaaatgctaagtagactaattggtaatggagaatttggtcttctaagaatatgattttaatacaataacatatactaacaataattaagacacaatgatggtaaatgtttgattctaattattttttttgttaagagtatgtgatttttcatgaacaaacaaaattgaatgttttaaactcataataatcaaacgtatgtgagaatgagtctatttattgaaaacagtgaataaattgttgatatttctaatgattttttctgttaagtgcacaagagatactcaagaaaaacttatgtcaatagtagcaaagcgaaaagatttaaacaagtcaaaagataccatatttcttgaaattgattatatttgcttttttaaaaatataaaattgtaagaaaatataatatttttgaatttatatttttatatttttgttaaaatcgaatgttaataaatcatgcattataccaaatcaaagagaaaatacataactttataccgatatttcttataaattaaatttgtttaaaaacaaaattatgcaaccagtgacttcaaacacctagtctatattaatagaaaggtctttgttttcagtgggaagttagttcgcgctttatcatcgtcttctctatcatcccattcaacaacaatgacgaacccaaacttaatcattgaagtgaacctgatgctttacgagatgtttctccttgagactaaggtatggatctgttactagtgcaatttttttatttcgattttgcttacattatagtataactcctttattttggattttctttcaattgttttgttttcgttcgatttaggtttggacataaaaaccgtacccgaatacccgaactggaaccgaaccgaaaaaattggttcggggcgggtacgtgtatatcgattttacactgatgggtcttatattagtgtacatgtgggtatcagttcgtgttcgggtattacccgatacccgaaagggtaaaccgaaaacccgaaccaaatctcaatattcttaatcccttatacacagtcgattttaggttctttaggcttttaaatcgacaaagatcaaaactaattcttatgtatatttgcctagatttcgaataacgtttacttagaacgatggaatgtgaaaccttgaagcttaacacgaacttgcgtttgattctgttcaaatttgggcattttcgagttgacgacttaaacctttggagacttgtggatctggagtactaagaatgatgaaatgtgaaacctcgattctaaataagtatttatgtgcgattgattctgtaatcagttggaattcgtggtgtttgatgctcttgccttttgaatttggtttacgtagaacgattgaatgagaaatgcgaacttttgtgcgattgattttgtaatctattcgaatttgttgtgtttgattctctttccttgtggtttggattactcagtgacagagctagaaaatatttttacaggagtgataatttaaataaaatattagtaaatttcttaaaataaaatacccgcaaaataactgttacataatatattagagactaacatgttgatttaaattttattaataataaaccaactaaataaaaatagtattcgaaatttacatgttgttttaaaactttttaaaaggaaaccaagctaaaaaaagttatatattgcaaaaatttaaagcatttagttgttatcgtataaaaagttgaaatgcaaaagagaaaaaaagaaatagaatcaataacaaaaataaaaccagctacatacaagtaaagaaaacaactatttcttgaaaaatgggctaaagtatgtaataagtggaatcgaacacagaggacagggggtcaatagtagacaaataagccaactgatctattactcaacaacgtaaaagctatacaaatctttgaggaggttcaggttgcactgccttgtggattttgagtacttagaccgattgaatgagaaatacgaacttgtgttcgattgattctataaccttgttcgagtttgtgcgattgagcttcttgccttgtggatatggatgaatcttgtgtgtgtgagcttattgccttgtgggtttatgaatctttgcatgtttgagcctattttcttgttggtttaggatgaatttgacaatttgtgtatttgagccacttgccttgtggatttgcaggaatttatcttctttattcacattcattagatttgtatgtaatcacaattaggaaggagatatgaatatgaaacattaagatatagactaagcgaagtacgcatggctcaaatacgttatcgttctgtttgcatatgattcttgtaactagtcctctctgatttttcagatgaatgcgtgcatctgggtacaagagagacttgcagctggtgataggctctctgtcctagctttcttgaggcgccttactgaaactgttactgatgtcgagaaaaaagaaatggtatatatagtctctttcatttctgagagctgtataactatcatttatcattcccggtatagtgtccacttctgctctgactttcttacattttccgtgactactacacaatataaaaggttgcagtgttttctgtctttgatacacactacttgttttcccatctctctcatatacacatagacacagtacatatggatcttcttcctacccctctcgtgacatgaaaaataaacacatatcacaaaactttcaaagaattacggcgtcaaaagaaaaacacatagtcacatacgtacttgttgtgcacacagataataacaagccaattaagatggattgataaagagaaccatgaagctgatcactgaacagataagtaggtgcgtgtaagaatcattatcacgttaaacaattcaagtatcaattcattgatcagcaaattgagtaattggtggtctttgattggtttttatgataagctctgttttgtgaactcgtcttctaaaaataactgattgtactagttataggtactatataggtttttgagggttatttgaaacatgaaacttcttatagaggacatgcgcttaaaatagaattgtatgcataacgtacggaaaaggattaagacggtgaaagattctggtagatcaaagggaggcatcgacgtgtctttgagaaccattttatcggagaaaagatagttgcgagttatctttctcaatcttgttgttaagagtcgctgagctacaagaatgcttctccatgcataagactagttaaaaaagcttagaagaagaagagaaacattgagatgtttgatgggtcttactagaggtaaaatctcaaaactactaactatttaagccgaggggttcttttgttaaccaagaattccttgatgtgaaagtttcattgcctcggctcctctattctaattgtatccatattcagaacatttagacatttaaaatctctctgtattaaaatcataaatgtactaatttaaaatatttttaattataggagctcaaagtggtattattcaaacttaatttaggtctctaaatacataatgctctcaagatcatcctcccaaatagtccaatgcaaagacctctctatatccaaaaaccagagacgtgagaatttctttattgcgaggcttcttattttgttcttctccaaatcatatatgacagagtgtctagtttcaaacgctctgatatttgtctttaccagcctaatctgactgcatcgactcatgcattgtatctccaacttatcgccatggaaaaacttcatttgtgaaagaggtaagaccagattcttatttgaccactgcatattccctgcatcctccataacccacaggtccacattgtcattagacgaaaggctggagtattctaaaacagctaacttgcctccgtagttaatgaggctcgctcgatatttttgtcaaacaatgcaagcctcaacgggtaattcaatcatattaaactcttcataagcaaagtcaaaactcataaccacacatgtgttcttataagtccaagctccataataagttgtttgctttaataaaccaatataccaatatatccttttgttgtttggttatctatacatataaagaaaaaagacatatgtatgtgatattaaatgggtcagcccaataaacgggaaaatttcttttttcagcataaacgaaaaattctttaacatttttatcttcaaccaaactgaattctgaaataattccaaatattgtcattagcttcaaccaaaaacttgatcttattaatggtaatgccacacgtagcttggtggttaggttacatattcgcactctttttccaagtctaacacaaatcaagcctcgaagagcattcacgaagtagcctcccatcccggcatcttcagaatttcatcgaacatagacgtatctccgcgatcattaatggacgttgatgaaagaaaatcatacctgttctggtcttcctcgtccacaagagacatgagcaaacgtggtcgtttcgacgatgctggtgattcaaggaaacgataggtaaaatagctggaggagattacggaataccagtgttgtgagacgcgcattgccctcgtcacctgtttcactggtaatttcactagtatctccaacaatagatcctcagtgatatctaactatctccaactagttcactactccctagactaagtcacttgaaaatcctgataggtcgacgtagacctatcataactctgtgaaaccatattcctatcataactctgtgaaaccaaattctttcattgggtaaatgttagcaagagccaaaccaaattagtccatcgtagctttttttctttcttgtatctacatttagtctactttacacatcccgttttcgagaccgagctagtatgaaaccctcacgtaaaatagtatataactagctcattcaaattggaagagtaaatgtgtagaggttaaaattcaagaagctctgatgacgccattatggaggagcacgaaaatctcaatttgagattgctatttttacttttgttgtttttagttagtacttgtagagtaaataagtaaaggatagattagtctttgtttaatacctaagtctctctaatgtattctctatatatactgtaattatcattctaatgagaatcaagcctcctattctatatggtatcagagctaacgatctatacctaaacctaaacactaagccgctttttctttgtttctttcttcttccttaatttttttttttttttttttcgtttctcttcgtgtcacaatggcttctgacactgttgctgttcccgagtcctccactcttctccatgtcaacatggccaatgtcacgaaacttacgtccaacaactttcttatgtggagacgccaagtccaagccttactcaatggctacaaccttgccggctacatcgatggatctactcatgctccatcatcgaccattatggagaatggtgctgtcactaccaatcctgcatacactttttggacgaggcaagatcaactcataattaatgactcatttaacagttaacagtcacaattcgtgaactcataattaatgactcatttctcttgtattggtaaagtctaatctgagatttagttgaatttattgattacgatatagtagtatttatttgggtagttgggttctatatttatagctagctagccattgattatatacagttcaccattaatatgaagtttatctttatgatcatatatatcacatatacaacacaacacaacacaacacacacattacacatatatacatatgatcatatatatagtagcatcaggtgttgatggcatttgctaatttttctcgatcgagtttgtaataataatgttcgtaatttggattttctaagaacatgaatgagtgataaaaaacaaaaatcccgaaatgtaaatcaacaaactaaggtaaatagtcactaaagtatgtatattcatactatttatatacataaaaaaatgtatgtatatacattgagatatatataaagtaacatataggagttttgcgtgatattatttccgcaaattttagaaattccaacttagagacactaaaatggagctccggaacatctaaggcatcggaataaggcattgatatggagatcataatcttacaaatttaaatgtaaaaatgtaacacataacttaacattttccatttaatgagaagttatgacgacatatcgccgcccatatgtatttggctgatattattttaacgctcaaactttaaaagatttgttcagatatccgaaactgttcaaacattcaaaccctggaaactagcattccaggatcccaaccctacaaaaaaatagtccctacaaaaaaaaaaaatagtccctacctctaattgaatcaatgtcctttaaaagtttcaaactgtttaaaaatgaaaatatcaaaaaacagattataaaaaaaaaaaaaaaattatgctcatcagtaaaactgtatatatggagtacataacagtctattgttagcccaaacacttcctactttttaaaaaagtttaagaagctttagaattccttcacggatttagtttttttttgttttgttgaaaaaacatgttgtgaatttggatgaactttccaacatcgctcgtcttcttaatcgtaacgattacattttctaacagttcgtcaaaccttttgtagtgatgggtgtaaaaactcactaaatcaatggggacataggtaaattttgggggaaaatgttggttctttttgacaatccacattgacaaaagttcacacttgatgtcataaaaatgtccgttggaccttagtgcccaacttgacaaaacttcatgattacaaaaatttataacaagtcggatactagcatcataccataacatgtaatacaatttttatacatatatatacgatatgtgtacatgtgtgtgccaaaaaattcgtcgtagttgacaaataattaaatactcgtgtagtaatgtaatgattatcaattatcagtattattatcttctctttctaataattattgcgaagcttaaatatgtgttctctcatgcacatgcatgatgcatattatcatcgcccaaagccacaagctttcgacgtgcttcattgtccactccacactcaagagctctggcatatatataattacgtacttggacaggttattattgtcaccgtacacttactcatttgattttaaacaagaatcgtaatccatggtctatataaatacttatattgtatcatcttttcttattttcctaacattaatttatactttcttgtttttcatttttgtcaaaaatttctagttatattcagttatgacaaaactaatttcgcatgcaagtgaattcatatactgttcgaataaaactagtgtggacctacaagtctctaatctctcatgtcgtatactattttctacattaacagcgttgatcttgtttctgtcgacgcagatctaattttgtttatttttgtcattttttgttaaggatctaaatttgttgtacaaaagattatatattttaattaaagatcagaaaatttacagacatcgtactgtaacttaaaataaataaaatttaacgtgtagttgggaacattcacgtcactaccagagagagtcacgagtgacgaaaacctttgaaatatgtcatctatcccaattcgttttttggctgattataactacgcaacaaaaacaaataaagatgttacttaattacaatacctgaagattaatataggtccacaaaccacaatccacatacacagagttataatacattagcatctatcttaccatcattgctacggtatcaagacgaataatgaagataccaaagctaaagataaaagaaccaaagctaaggataaataaagtaagagcattatcacttttattccacgtgtcattatactgatgacgtggcatattcctaattaaaaagtgttattaggatcacggtaacgttacttccctaacaaaaacataaatacgagatagatagctatttttattttcattgattatatagcctagctagtaatagttatagtaatcacgtgacgcacgtgacacatgacgggtgatgagaggggacgcttcgacggcggaagcagcggcggaggaaacgtcttcccatatttccgagaaggcacggacgatgatgccgtgatgatagtgagaattgaggctgaggaaacattgaagaagctctctaagttcatctttcgagtaaatctggttctctagtatcatttgaagcatagactgccggaaatctaggtacggatcgtcagaatctttctccacggcgacggatgcggtggccaaaggcgtggaggagggtgtggcggaggagatggaggagtggcagtgacggtaagtagacgagggacgtttaggctttttggagaaaaagttgaaaatagaggcgaaagttggttttatacagttgccgcagctgatgtcgacaacagatacagtcttcaggatcttcttcttgcttttagtcgccattgttctgactctgtatctgctaaagactaaggaggagagagaagaggtatagagattatggagggagggttgatatatatatatatacagagatatagaaagtttgcatgaatatgtataaatgtatgcatgtgggtcataaatttataaatttcacaatgaatgtgtattagaaagtctagattttttattttggatttttgggtgatcaaagaccaaatatatatatatatataaaaggtattagtgcatatacactagtttttttttgttccttgcttggaatatttttattgcagatgctattagaccatgcatactttgatttcaaccacataattttgacaatctgaattcgaatgaattcaaatggtctttttttttatatataaaaaatgtattcagatgatgatacagacatacagttgaaacaaaatagtgcttataacaaagctatcaattttgtttgtttgttatttgagttaattgataaatgtgtaattttagtagtttatcagatggaacatggaaggatggttaaaaaatggagatggcgcctataaccaaatatgttgattaacaaaatcggtcactagagtctagaagtcttaatggtttagagttacttcacatgaagaaacatccgtaataaatgagttacatatatacatcttaatcatgcttattttacaatcttttttttcttattttacaatcttaatttcagaacatacactttttctgaatttcttaaagatagtattgaatacatggttagaacttaaaagtgctacgggcctatatacggcctttattcaaacgtccatattctggactattcgaacaagaagagcattcaataataaaagagaaaaaaaaaagaaaaggatactatacaaatatttgttagtgggtttttctagcttattcaagccattttgcaagcccacggaacataaatgcattgtagtctcatgtattgaaccaaagttttggtacactttgaacaagtcttgagtcttgacatcataaacaagcccctagaataatcaaacgtaaaccagcgaaggtataacagcgtaatcaactaaacaacattgatcatggagtctagcgccactttcagggctcaagctgaggcgtattatgtaaaacgtgaacctcaaataccttcacgatttgttataaataaaataaaaatactgatgaatcatgaaaaaaaacagagattgtttgagaatcgtttctcaattctctttgttctgtgtcatttactaagccctaaagattttctgaggagatgggaagatgcggaggagagcatcaaagaaggcggagacgaggcggatgaaggaggaggagacacggcggaggaatgaagggttggaggaaggagttggagtagaaggctgaaggtaggagcaagcagcttgctttacaaggcgattgcggatcgtgatggtgggacctgatacagcggaggcgacagcaaaggatatggcgggggaatcgacggtggtggaggaggaagggaggatgtctttgagggaagtgtaacatggaagaggatcctcggaggatttgttgacggacacgagctctaaatctagggtttgtgaaacggcgccgtttctgcgttggagaagagaaagattcatcaaattctcagcttccattttgagaaaatagagagtgagaaggtttggaagtaatttggatatgagctaacaaagtttatatatcaataatagcattgatcaatctgaatcatcacgttatatttttttcatttaaaagtcaaataaggactatattgtaaagcgtgttaatacaatattaatattgggaccttatttttcgcttttttagaatttaattatgttaaagaaacaaatttcttgaatgaaatgaatagagatgtagtagcaaatgctggatggttggcagctgacgctccaatctcgactactttatatttttcaaagcaaaacaacgaccatattttatttttacttttaaaaataagtgtgtctgcctttaagtataaattgaattattgtagtgaacttttttttgttttttgtttccactgtttattatgatatgtttaaaaatacatatataaccaccagcaaaggagtgtaaagtaactcattcactacaagaattatgtaaaaacattttcctaaaaataggttccattttgatttagtcttccttaacgacgacgattttgatgatacatattacatgtatcacggaaagggttgaataaagtcaaagcaaacatcacaagaaaagggtcaaatgaagcagctttggcccatttcacatgaataatgtttcattggtcactttttcctttcgttaccactttgtcaattgagtcaccctccgatttaaaggtctgtacgttcgttacaagttacatcaactcgagtatccctaacgagcactcgtacattttgccctacaatcaagaatcaataatatccaaacaacacttttatttcgtgactgagccaaaacaaacgagaacccggtcctatcaaatttatatgaccaggacatttcaagagagcatcactatatataacccatcgcaataaataagaaataaagtttcattaatccgagatatttagtgtcttcggttttctaaaacactcatttagagacaacggaatatgattctcacaaaaaaaaagaatatgattcttacaatacatcacaatcaaatgcatatgaatgtcaatgagaggagtgtttaagttaattgtgttaaaaatctcacatcgaaagtacaaaccttatcacaataggagaataagctataaaaaacctacgacaatagatatgttattatctcaaatacccgtaaattgaaactcaatgaattattaaatacatggaatcaaatttcagtataaattttgttaattaaatatagataatatacatttacattttttggtataaattataccgaatattacaaaaccaaactaaaacgtagattcaaattgaactgagtcgaaccgaccgactcaagatccccaaaaccaaaaaacttttgttgttgacaaagaaatcaaaaagggctaaaaaagaagatcgagaggttcgggaacaaatctctctatctaaaagaaatcataagtgaccataatttgtacaatgttcgattgttagagttgacgttaattttattgtcaattgcatatatgtaaaatatgtcttaatttaaaaactaatttgttcgaatatagtgaaaatcatgttttagtgatataaaaacaatttgattaaaataataacctacgcctgaacctcatcaactataaaggcaagttaatttttttcaataaaccaagtttgcttctaatgcgaatctaaattgttgtgttatggacaatgccgagaaggtgttctaagtggaacaaattattagacaataagatttttctccaagctagttgtagagattgttttacaataacaacattaaaattttaaaaaaatctagataatctatgattctaactcttcttaccacggacagacgatcgcggatccatagaaacttgttcatcgtaccagttgaagaaaccctctgtaaacaacgaaatcgaagtgagaaaaaatacctccacatcaaacccaaatcatcagcgttcattcgcgtggacctaaagtaatgtgggaataagaaaatttaaggcggttgtcaaaattataaaaaattaaattgaaaataggagaaattttttagttcgacacatcgttttttatttatttattatacttttatttatatttaaattctgagtcttccgaaagagttgatatatttgtgctggctacataatttttcattggttatttttgtgctatcttagtataatgataacatcttctcaatgcaaaaacttataaaggtttacttatatttttcctctcgcgagtactatttatttatctagacttacaaactgattttaatgtgtgtggatagagtctagtatcactattatatcagcaaagataacataaaatccgtagcaaatttcacagaggtcatgcgttttatagattaagagtagaattaagcttttgaacctccgtaaaatgtatcttgttttagctcacaaaagctttattataaatcaaccataggtctataatagagtaaagtccatcaagtctgaaatgaacatttttcatccctaataaagtttcaacctttttttttttttttttttttttttaagtttcaactttgttcttgctaaaaataaagaagcaactctgttcttattgactatatcaaatcatccctaaactctagggatttacttcaacgacaaagtaagagttgcagtcctccattttgaacctttctagaatctcacaagcatactccaagaaataactcatttctccagagtcggacttatcgaattctatcctcatggaagccttaaactcttcaaccatgcttgctttagtccttgtcaggaccaaatcatcaacctatgatacatgagcagtttacttctatgtcagtcttgacaaatagtgttacttttgttatgatttagtgatgatgattcttgatgctatttacaatgttagagcttgagcaattgagataggtgaataagaatttgtatctaggtgatgaaatagttgtttttgtcttgttagtagagttttcttgtaatctccatgcccttttggtgatgatcgtttatgtttagttacaatgttaagataggtgatgaaaagtgaacaatgttgtctctgtgtcagacttgggagaagagtacgaatctgtaacctcaccaccaagcaacgtgtgactttgcccatcataagatcaagtcatttggaactattttgggtatgactctgttaatgatgaatacaaagtgcttcgcaaagtttgggaggtgagcaaggaagatgggcagatgagatccgagcatcaagtgttggtacttggtcctggagcttattggagaagtacttatagcaacgctcctcctcctcctcatcgtcctttctcacaaggtatctccatcaacggtatgttgtactatggagcagcttgggttgatgcaaataaatgtgtgctcgtgagttttgacttgacttttgaagaattcaatttgattgagttacctgtagaggctggtatcatttggcactcatatcgtgctaacctcgttaactacagagacaaattagatattttcgaatactctaaacttgcggttgatgcgagtgtagacctaagggttatggaggatgtgaagaagaagaagaagtggtcaaaaaaaactttggtcttgccacttgaccaaatgaatgttgtccatggcgatgacttggtgctgcccggcacgagtcgctgcgttcagctcagactgggaaagaaacatctcttcttgtatttcatttttaagttctgtattgtgctttcagagttgtctttgaactgttagaagcgctcttcttgaaatgaaaagtgattagaaatcctcccctaagtttgaagaattcttagcagttaagatggaaaagtttagtatgagttctaataatgcttgatgatcaacttggctgtgggagctaatgacacgaatttcatgatatatttaggtttgagggcaatttaaaacaaaaatgaacttagaatcatccctagtcaaaatgactcattatttattttaatattatgaaattacatatacgaaggtataatttatcattttacttttaggcgttgaggtgacgtcaccgtgtgatacaagattgaccaccgcatgtcccaccgtgtacctcggttaattcacgtgctccctaatttccacggacaaacattaatcgttcctctgaatcttttgttgttattatattttgtttttgtccctttcgttcgatgcacttgatattttttccccgtgatagttctaaagtctttcttccatttgcaactttaaaacttatctatttgatgaatcattgttgatgtgaaattataccagtccagtataagtctttcctacaattgttctaattagtatatcactcacgctaggaaaaccctcaagattgctttgttatgaaataaaaacacatatccaatagaaaagcaattcgaaattcattaagatcatttaagagtaaaacaacataactccgaaaataaatttaaaaaaacaaaaaaaaacgagtaagcatatttggaaagtcactggatgagcctagttaactaggatctaagctaagaaatagtattagttcccttcaatcaaatcatatatgtgggttacatcactattttatttgaagcattcgtgtcttgtttttaatgtctaaacatactcagcactcttataaaagtatcatgattgatgaaagagcatatatatgcactaattaatgttaatttgtaaagagataactaaaaccattatcagtagtatcttcttcctctttctcctttttcttatatacagagacaccattgtattttcagtactacatatatatttttaaaatgattcttaaaaaaattagagattcaacaattcgtagaaaaatagttgctggtccattgaacgttgagataagaagtttttaaaaaataaaacagtttttcagttgacttcggtgttggtacctgctcgttcatttttataaacctagtttaattggcttgacctgtttactctatttctaacacttcaatagaaaacttttctcaaatttttctgaaactatgtttgttttacacttttactgctgcagtagtacaaatatatcgaagttgtctcaaaaatactttctcaagttcataattgttaaaacatattctcaagtcttcttagttaaatatacttactgacttttatttattgttcatcaatatgtacgcattaataagtcacttctttgaaaggaaagccttaaaattatttgttttatgacctgtttgccacttttaaaagtttaaggtcatatagtttataagagtcaacaaatatacatgtggtcgattcctcacacctattgtattcaacgtgctttttatttcgtcaatggatttataacgtcgagattcatgttacgatttattaatctcttttttttgttaaatacgatttattaatctcttcaaatttttatcaatctatatgcaaaaagttacatgtaaacaagaagtcaattagaacatggagtatatatatgaatctcatatgatattctggatcttactatgaaaaaaaaaaaaaaatatatatatatatatatatatatacagttgaaaaatattgttaaaccagtcattccctcataagtacattcagagtacatgattacttaaaactggtgaataatctgaagtatggaacttggacgggaaaaaactccattcctcaaaaacactgacaaaatgtattcaactaaagcaacttgtaaatctggttagagaagatatggattaataaatatgcatcacatgatttgtcaatatggttagccccttgagcgatcatcacatggccaatcaataatcatgccaattaattgaaaaagataggtctatggtgatttcccacaaattctcttagttttatttgtttagttggaatttttcaacgacataagcatgctcttttttcaacttgaatggcgtaaataatcctataattagtatttgactatttgtatagcaaatatcattaaacacatatagtatacctccacaaaatcaataccattggcattttctatagatacaagaatgtattggctggctctgtatcatcatgtctacgtagacagagatgtatcatgtcgactaaacaaaaattacatttccacgtataagatttacttatagtagtaactagtaataagtttccaagtaaaaacagacacatttaactaaattattattctaaaacatttttataaaaggaagaagaaagtcacagagatcgaacatgattctccactttccacttctttgtcttctttcttctccttctcacttacttaacccataagccatcaatcccaaacacaccattacaatggcttcttctatcttcttcttcttccttatcttcctctccgtcgtctccgccgtcaaactacctctctctcccttctcccactccgaccaatcaccaaaagacccttacctctctctccgtcgtctcgctgaatcctcaatcgctagagctcataaactcaaacacggcacctcaataaaacccgacgaagatgctctctcctccaccaccaccgcatccgccaccgtcgtgaaatctcctctctctgctaaaagctacggcggatactcagtctctctcagcttcggcacaccgtcgcaaacaatcccattcgttttcgataccggaagcagtctcgtttggctaccttgtacctcaagatatctctgctccggttgcgatttctccggtttggatccgactctaatccctagatttatccccaagaactcttcctcttcgaagattatcgggtgtcagagtccaaaatgtcagtttctatacggacccaatgttcaatgcagaggatgtgacccgaatacccgaaactgcaccgtcggttgtccaccgtacattcttcaatacggattaggatcaacggctggggttttaataaccgaaaagcttgatttcccggatctaaccgtacccgatttcgtagtcggatgttcaattatctccacccgacaacccgctggtatcgctgggtttgggcgaggacccgtatcgcttccttcacaaatgaatctcaagagattctctcactgtttggtttctcgtcggtttgacgataccaacgtaaccaccgatcttgatttagataccggatcgggtcataattccgggtctaaaactccgggtctcacatacacgccgtttcggaaaaatcccaatgtctccaacaaagcttttctcgagtattattacctcaatctccggcgaatctacgtcggaagaaagcacgtgaagattccgtataagtatctcgcgccgggaactaacggagacggaggatccattgttgattccggatctacattcactttcatggagcgacccgttttcgagctcgttgctgaagaattcgcttcacagatgtcgaactacactcgtgagaaagacttggagaaggaaacaggacttggaccgtgttttaatatctccgggaagggagatgtgacggtgccggagctgatttttgagtttaaaggtggagcgaagttggaattgccgttatccaattacttcacgttcgttgggaatactgataccgtttgtcttacggtggtttcggataaaaccgttaatccctccggcgggactggaccggcgataattctggggagtttccagcaacagaactatttagttgaatacgatttggagaatgacaggtttgggttcgcgaagaagaagtgtagcccgtgagttttcaggggtaaatttgacttttcacaacgatgagatcaatttttatgatttttaattccgttttccgaaataaaagaaaagggtttaaatgtttatagaaatatcagaaatatgtaagagtagtaaaattaataaattaaaaaaaaaaatcgtaatagttggatgctaaaattgtcgatgctagacattatcattagaagaaagatgtttgcattatcgaatatggacaatataatacagtgataccacgtcaatgtccattaatctaaagtaaccaaacaaccactaatatattcactaattatcatagtatttttagaaattgaatgtttattgatgtgaaacaaacatgtaagtacatatgacatatccccgtgtaccaaataaagtaagaaaaagttcaacttttatttaaatttcagttttatatagcttcgactatattcatagacccatttatcaatggaaataataggtacaacaaagaatttgtgaaatgatgcatcaaggaataaagagatagtatgttgacgaaaaaaacagaaatacagtagaaactctaaaaaattaatattcgataaattaataaacatgataaattaataaattttatcggtctcaagtcgggtcaatgtaaaaattaatcaaaatcgataagataataagataataatttttttaaaatctttatgtaaaaatatggttccaataatatcataaattaataattataaatcttaaatatatattttaacactaattttatataaagtttttattcaagccataattacaactctttttaaagtacagttggtataatatcttttgtactcacataactctttacatattttatccgtttggttttgtaacattttttaatcattgctaagatttgtataaagaaaaattggattaaacctcacgttaacgttgtaaatatacaaacacaatatcttgtaggaaaataaattaaaaagtcaagaaaaaaataattttttaacataattaaatatacaaacaacaaaacataagaaaaactaagttaaaaaatatttttaaaataatttagtattgtattttacgtaaatatttctataaattaatatttattataggataaattaatatcactataaattaataaaatttcatggtcctaatattattaatttatatagtttctattgtactagtttaagaaagtaaaaaaatggagagttaaaagcgacataatttttttttctctcttttttgagcaaaataaattgcacctttcttaatcatgccagctcacaaaagttcctaagatattttcttaataccaaacttaatgaggttctgattggtgcatgatgttggcgcgatcagtgtaatttgtttggtcagtgtaatcaatgagtttttttttatagttgtcaaccagtgtaatcaatgtgattaattaaaaagattgaatttagagaaaaaaaaagaatatagtataaaaagttaacaacaatagtaaaatattttatttcagcgtttttccccaacattttctactacagtaagaaatgctgaaatgtcatttaatctgaatttacacatattttcgaaactataaggactacacggttgtgcaatttaccgactaaaaaaggtgggggcaatgacaatgtatagccaagatgcagctggatggatctccttcatctgaaactggtccaacggaatagaagataagtgtccaatcacttatctgaaactggtgatgtctacatattatgggcctaaaattgtaggccttatcgaagcttatgtatattttggttgaatttaaaaaggcttcaatcgacaactgttttgggcccatcaactaaacaagcccaaaatctggacgcgcgcggaggatcgatcatacaagcgaaacggtcgatcaagtagggttccttcctaacctacttctgatcagatcgaatcgtcgccggcgcatttctccggcattcttccagatccttaaaggaatattctctttctgtacaagtaattctttcaaccttttttttattactagcaaatttcattattagaaacccttagtttgctcagtaatttatctaggaaatttatttacgagaacaagttttggtatgatcttgaaaattacttgtttgcatagtcatttatctaggaatgatagatgattgaaaaaaattcaaattccgcagctaactcgttttaacattgtttggaatttccaaagcacgaataagtctaatgcacaagttcttttcatgatattttacttgttatctagcaccaagaatttcgcttagagatcatcagacactttctgatttcaactaattttgttctcttatatctgctgtcatatcattaaaatcgtgtttcttgtgataggattcttccaacgcatgctcagttgctcactacataattgcatatgcgtgatctctttaacattatggattcacacatttatccgatgatacgataggatatgatacttgtgcggctctgctagcttaaacccttggaaaaactagggaacaagtgatgaagaatatatgccacagttttagattcttatcgaacactcaaatatatttgaaacaaaacgaacctttcttttagattgtgggattattgagtaatattgttatgcaaggcaataaaaattctttgtgaataaaagaaacatgttgtgaataaagatcataacattagattaagaaggctgtcatgtcaaaattaggacaacttttctccattcctcctttaatctttaaagtttatctctttctttcttaaagttaggcgccatccaaaggaaaattatgccttaaactattcccatatctctctctttgctacttctattcgttttttttttcccacatggccacacccaggagaataaagatgcttattttgaatactgagagctaaaaaacaaattggagccccttttgagtagataatcccatatattgcttttatacttgattttgtgataagaatgtcttactttaatattgtttaaagaattctagctagaggctctcttctattgtatgtgttcccatgaaaactcctggaaaagggtttgatttgatagaaaccactatgacaagtcatgcagaaagacacatatacacgtatgacttttaatactttcatgcaagatttcaaaaccagtttcaatttaactcaagtcactcaataccttccttagtgattttatataaggccacattctctaaaagctgatattacattaactcaaaaggtttataaagtaggatggatagactcataggatttacgatgtatttttctcgcgaacataagcgctttagaatcatatggggtctgatcctgattaaagcattcacattttgaccgtcctggtcacacactttcttgaaaggattggtttacacaaacgactttctcttctttagtttgtggcagatgctggatgtttttgtcgagccaaacaaagttagataaattttgattagaggaataaagtttgattgggtgtgacagaagaaaccatctatattcctttgctttcttttgttcaaaatacttttgcattgaaatgattttggtctcacctttgtatgtcttttgtgatgaatttagctcataaacaaagctttcttttcttttcctttttttccctaacaaacgcgtataacgaattggcgagtttgtatttatttcggattttgttgttaatttggtcatacaagctagtttcagtttaatgtgaaacaagcaaaatacttatatagtaagtcattttaaagcactgatgcaaaatattttgtgttgttttgtaaaaggccaaattcttcaaagttgatgtctacattggctgtagctttagcaagtgggcttgagagatgggttgatttcacattctgttcttctcgtaaacgcaagtgctttagaatcatctggggtctgacccttgttaaagcattcacattttgacgactgttctggtcatacactttctcgaaaggactggtttatgcaaatggatgttcttttgttagggcaaacaaagtttgctaatttttattaaaggagaaaagggttttagattgggtgagcctgaagtaaccatctatattcctttgctctcatcattcaaacacttttgcgttcaaatgatttttggtctccctttggatctcttttgggtctaagctaataaacaaagcccctttcctttctttttttctgtctcaaacgtagacagcgaggacgaaacagtttatgagtttgtgtttattctcataactttcttatttggtcccactagtcgtctgtaactaaggcattggtatgtattctgatatgaaaacgagtttaatacctagcattcatgataattaacttataaattcaagataattcggtgtccttttatacaccatatatacatacatatataatcatgtttcttttgaatcataactttggactgatctcacaaaattcatttgctttttcctcaataatgattgtaggatcatttctctttgttttatggtacattatttgtatgtttttccccattttgagttaatacataaatgcatgggtaaatgatactttagcttcttttgtagaagcattgggagagtgagtgagtgaaatagtacctgttgcagagaatagtggctttcaggtgaaggcttacataaaaacaagtaaaaagctgaaaaaagatgattggggaatgaaaggaagatttcttgtttcttgtgagaggatattgtaatttttattctctattcttcaaattcaccataagaaaagataacttctttacaaattttatttgtcttttaggacatacatatctctatagtgggaatctatagcttaatatgattctcttatcaaagtgtataaatcttattgaagattcctaggcaagttgaatggtggtgtatttttctcttctttctatgcagtggcatgcttcatgtgagagagagagatatgttttcatcaaagtagaagtataataggtaaagctccttgtaccaattactgcaatgatctcatgtttgaataatccatacgcggaatcatttctttttgttcattgattataatagcatattccttaatcactattcagattatggttttgtgtgtttttgtcaatggattcttcaaagatttaagtggcatctgcatctgtttagctttgtgtgtgtatatatatctactatctagtgttatcaggttaatatatataaacatggcttgatatgtttgttagtggtacgagaatcaaacttttcttatctcttacttatgttgcaattataaaataatccatatgcagttctgcttctatgataaaattaatacacagttctgtttcttgttcttgaattacttatttgcttttgttttggtttgtggtttcctgtcacttatctgaaactctgatttcattaggcacttgaaaatgattggtcgtgttgatagcaaatacaatcaaagactgtccccaccaagaaactgactgccttgttcgctttcttttattttttttcttgttcaaaacacattcgtttcttcttcttcttctctcgttttaaaattgaaattaatatatggtccaaaagctacacacttttatgaaagtatcaaagggaaagtgaatgatgcatatatatagtgtctgtgttgggtcagatggtttgatttgctttttagtgttttgatattttagggggttgagtttctaaataccatgcagaaattcaaaaacatacaaagaccaagctagtgatccttatatattctgtgtttcctgccccaaagagtttggttggcaaaaatgattatgaaactaattttaaggtcttattatcaatatcattactagttgtctgaggaaaactagtcgtcaacatttttgatttttgatgatcgatggaacctaattttgtatagagaatgggtcatacatttaatcataatcaaatacatgttaacacttatattaaactgttttcttgatcaaaaccaacaatattcttaggtttgctgagacatagtttggctataaatatacaccctttttccttccaaaatctgttcactcccatgtttttatggctactagattgttgcttacatgtggacttgagtttaagcttacttgactggatctagagtaaaagtctgttgtctgaaaaaagtgttgggagttggctagtagtatagcttcaaggtgctacaaagggagagtgattaaatccccaattttccataaaatgttcttggggctattatttatttatatattatataagtgaatgatgatttgcatctttaattaggttcttttctaaataagtgatacactttgcagaaaagagagagacccacttagctgcagtacccattacatcttaatttttgtgaaatttgagaaagaaaagaatatatgggcaaagctgagttacctttgccttttgatactgctttgtcatcacatgcattccactttgcactacaaaatccactttggaccctcaaaaaaccccccaaattttttgcctctctcacaagaaaagcatacacattttcctccttctccttcctcatatatttgaagaccaaagtccatttttctttctctctctctttctctctcgctctctctatatccttactcttttcttaggtttaagacttagccccaccttccatatagacgccgtgttattagacccttcttctttgggtgtttttgttgtccaagataaatggaatgaagccaagattcttgaagcttttaccatagagctctcacttctgagtattagtactatccccaccttgtgttattttagggtgttttgtcactatgagagctggaggctgcacggtggagcaagccctcacggcggatgctgcaaacgtggtgaaacaagccatggggttggctagacggagaggacatgctcaggtcacacctctccatgtagctagcaccatgctctctgctcccacgggtttacttagaacagcttgtctccaatctcacactcaccctcttcaatgcagagccctcgagctctgcttcaacgtagctttgaaccgcctcccgacctctacagggagtcctatgttaggggttccaacttcccctttcccttctatctccaacgctctcggtgcagctttcaaacgcgcacaagctcaccaacgacgtggttctatagagagccagcaacaaccgatcttagcagtcaagatcgaagtggagcagctcataatatctatcctcgatgatcctagcgtgagtagagtgatgagagaagctggtttctcgagtcctcaagtgaagactaaagtcgagcaagctgtttctttagagatttgctctaaaacaacctcttcgagtaaacccaaagaggggaagttattaactcctgtcaggaacgaggatgttatgaacgttatcaacaatcttgtcgacaaaaagagaagaaatttcgtgatcgtaggagagtgtttagccactattgacggagttgtgaagacggtgatggaaaaagtcgacaaaaaagacgtgcccgaggttttaaaagacgtaaagttcataactttatcgttctcatcgttcgggcaaccaagtagagccgatgtggaacgtaagctagaggagctagagacactcgtgaagagctgtgtagggaaaggagtgattctaaatctgggagatctaaactggttcgtagagtcaagaaccagaggttcttcactgtataacaacaacgatagctactgtgttgtggagcatatgataatggagattgggaagttggcttgtgggttagtcatgggagatcatggaaggttttggttaatgggtcttgcgacttcacagacttacgtgagatgcaagtctggtcaaccctcgcttgaatctctctggtgtctcactactcttactattccggcgactagtaatagtctccggttgagtctcgtctccgagaggtaaaagtcttctatcttttgaaacagtcaagaatgtgcaatcaacaaatctgtttattattttatttttttggttggatatgttccaactattttgtctctttttcgaaaaggacaattttacctatagtgtttttgctttttatttggtgatcatatctaaaagaacggtgaaccaacgtgcatctttcctaactttttctctattattttatagctttttattataagctttctttggagaaatactaaagaaaagttacatataataagttacttcatttaacagttttaacactactaactgatataattaccattttgtttcaaatcagtgagcttgaagtcaagaaatcagagaacgtgtctctccagctgcagcaatcatcggatcagctcagtttctgtgaggaatgttccgtcaagtttgaatcggaagctcgattcttaaagagtagcaatagcaatgtaaccactgtagcattaccggcatggcttcagcagtataagaaggagaatcaaaatagtcacactgtgagttgtataaacatcaaatcagtttacattatgtcatttgcctcttcttataagtgcgtctatgttgtggtttttggacttggcaggattcagattctattaaggaacttgtggtgaagtggaactcaatctgtgattcaatccacaaaagaccatctctaaaaacactcacactctcttctcctacttcttccttttctggttccactcaaccttcaatcagtactcttcatcatcttcaaaccaacggtgattggcccgtgatcgagacaaacacgcatcgtcatcattctgttgtccatgagacatctcacttaagactgttcattccagaacatgacagcgagcaaaagactgagctagtctgttcgaatcctaattctacaatgaactctgaagcctcttcaagcgatgcaatggagttggaacatgcctcttcaaggtttaaagagatgaatgcagaaaacctagcaactttatgtgctgccttggaaagcaaggtaccgtggcaaaaggatttagtcccggagttagccaaaacagtcttgaaatgcaggtcaggatcgagtacgaggaagattaacggaaacgaggataaaaaagaagatacatggatgttcttccaaggtcttgatgtagatgctaaagagaagatcgctagagaattggccaaactcgtgtttggatcgcaagacagctttgtctctatctgtttgagtagtttctcgtcgacaagatcggattctgcagaagatttgaggaacaagaggttgagagatgaacaaagcctgagttacatagagagattctcggaagctgtttcgttggatccaaatagagtgatcttagttgaagatattgagcaagctgattatttgtctcaagtgggtttcaagagagctgttgagagaggaagagtttgtaattcgagtggtgaagaagcttcgcttaaagacgcgattgtgatcttgagctgtgaaagatttcgttcaagatcaagagcttgttctcctcctagtaaccagaaatcggacggttcagatcaacctgaggacaagaatgttgctacttgtgttgcacttgatctaaacctatctattgatagtgcgtacgtttgtgaagaagaatcatgtgatgagattggcttactcgaagcggtagatgcacggtttcatttcaagtgttcatcaacataacactaacagcatgcacgtatgcatgtaacatggcccagtttatgaacatgatcattcgcattacatggtttatggtcaaccgttatttaatttgtttcccttacggacttatctttcattgggttggggcaatactttgggttaaacgtgtagttgtagatttgctttttcaatttggcttaggaactttttagaaggatatggggttaaactagagattttccttttttatctttttttttttttgtcttaatgtaaaattatcatattatggtcgtaaatggtaatttatgttcatggataagagacggaaaaataatcttgacacacattggattgaaccaacggtacttacaaaagaatgtgttgatacatcaagtaacttaattagtagcttatttttaattttgaaaatagtttcatcaggtgacttacatatttggtataaaaatacattatctgatacagcataaatttgattcgctgagagatataccaaaaattaattacaaacaaagaatatcccaaaataaaattcttaaaataatatatgcttaagaataacccaaattaaaggtcgaatttggaaaagtcaagtttatttaacaagaaaagaagaatataaactatacttaagctagaagaaagaacacttaagctagaagacagaacacttacaatctgttgttgttgtgactaattatatagtatagaatttcgattattttctatcataactacgcatttaatctttagcaaaaaaacacatttaagtaatttaaccaaaacatgatctaatatgaaaccgacggaacatagactagacaaaccatagttaactcttaatctgtctaaagactttttttttttttttggtaaggcttaatctgtctaaagataaagcatacaaaactggtcattgtttcctttagaatccaagacagcttgattgatattaaagatctacacaaactttattgcctctctgtttcatttcatcttttcttttcttttctcccgagagaaagggagaagccaccaccttagaatcttaaacgcttttctctaattctcttttgcctttccaagtttagttttcatttaaatctcacagttttaggtattattgatgtatatacattccctggatccgggcatatgtatggatcacttttgtgaatgattctcctttcacaatgtgatgctttgctttggtttcaaataagatgaagctttttccgcttggatatctttttctcgtatggaaaaagagcggttactttgaaaaatattcatatatgacttgtaccaaaacgagttgtttatgataatattaatacatgtagttgatcttaaaaaagcttttctatatatatgtatatgcatgcagcaaagtttttctatatacttagctcactacatctataatcgattcttaagaacaaatatttgttggtcaatttctaaatgacaacaatttatgattatatgaatcataccacttgaaagaaaacacccatgtgtaaacacaacgatatccacattaatatatttgcaaaataagatgaatgcatataatatgaatgcgtatagatgtccatcaattcatgcatggaatctaaagtttatcctcaaaagcaggaaggaagataaagttaagcatgattttagaaaagtaaataattaatttatttacaagaattgcagaaagtgggtgacccttttaaagcagaagagaaaaagagagggtaaaaaagctaaattctatctctctgcttttgggggggttttaagcttttaagagtcttgtgatgggcatttagtcattatagacctaaactttgatctcaacataatgcactttttatctttaaaaaagcgataaaaacacactaactttttctcctcttgtaaactttttaggttattaatttttttttttaaaacaagatagtactagttatttattagaaactaatgtaagcaacacatgaatccactataggttcaaatttaaatatactgagagcttactggcccaaatctatatctcaagaaggggtcatttcaagggcttaaatatcttatttcttctatgagctcactttcaagaatcttcaagatgaattagtatacttcaaaggcgtgttatgactgacgagtatatatatgcatgtctattttacaattcctagaaatttatttcaaaaacagtttgtaattagtacctcatatatgattaaaatctagatgatggagatgcatcaggcaaaaaaactagaatcctaatcataaaccctgaacagtggcgtgttagactaaaatgggccgttaaaatgttaataattatttgggcttttttgataatcgataaactcaaatctctgattgttataaaagtcaccaatttcgcattcgcatatagcacattcaacgtagatgctcgttttttttggtcagctaaaactaaagaaattttagacactccatgactccaaatagtaagtcgtgtcgtgtaccttcgctttcaatcccgatttgactattaatgatctttctaaccggaacctactcagcaactcttttccgattatgacacttcaactacccaataattagtaataatttacgagactaccccacttcagtttctgttcttatcttaaaacatcatatccataattacgacaaacgaaacgacgcagtattaaggttactctctctcaaactctcgtctcctaaatgggtcttaccccaactgcaaccctactcgtcgctgttttcgcgttttgcctcgtcgctgtaacggcgcagttcgcctacgttttgtggtggaaacgtcggttccgtcgtcggagtatcgccggatcagaacgcgacgctttttcctctcgcggtggtgacctaacggctacaccaccgccatcgaaagagcttctttacttcttcttgttctgtctcgaaaacaaacagttcagaataggatctgccaccgctccgccgctccctgcagccgcaccgccggttaatgacgtggcatcaaagtggtcaataaacggagaaaatttactttgcggaccttcggagactttgtttaccatcgctgaagactatactagcgagtccgatcatcggacgggtgagattgatccacgtggaagcatctttacagaggatcatgtaaaggatgatgaagtggaagaggaggtagtcgcgacggatataagcgacgacgaggttgactttagccactataatcaaactacgccgttttctactccatgtgcttccccaccgttttacacgccgtctccttctccgattcgtgatgatctctctaagacggtacgtgaggagagtgtgtacggctgagataggtttagttctccgattagccggggatattgacccggtcaaagatacggtgtcaaaggaatgggttattatatattagtttctaattttctatcaagtttggtttcttattttctatcaagtttggtttcttatttaaccgtgatctaaccaaattataaatcaaacggaaaccttgttgtaaatttgtaacttgtatatgggattaggttctgttgatttcatgatttgttctttcattttttttttctctgttcggttttagtttgaatttgaaaccaacagaagagactcagatgtatgttctatagacaacaaaaagggagagaactaatctaatcgctgccgtaatgtcttgtgtccattttgtgcgtttgaaaagcctcgtgaggtttattgtaccatttcaacttaacggcccaaaatgaacttctaaggcccaactgttttaactattttacggtcatgacattcgttgagtagtcgatttttttttttctttactattagtttttacctaccatgttctcattaaacaaatgaactactttattaaaaaggtattatgaatttatgagcatatatcagggccatataatttatattaattcataattatatcataagaatcgaattatatctctctaccagcaaaatatattcctcataacattgcttttcacaacttatagaaattgaaggtaggacatttttcccttacatatttaatacaaaagtaaaacaatagggaatggatgtcataagttattgccttgttacgtatgcaatttacaaatgctttgattaaaacgaacttacgaattagtaaaatcataaaggaaacagaaaaacgaaatgaaactataaaagaaccaaaacccaatcctccattttatttcaactttataaagtggatttacagttaaatccaaccactgaccttcgtgattgtaataattctataatcaacaataagcttaataacaaccaaaaagtagtgaaatcttaaagatatgtagaaacagaaatagtatcctgttggtggaaagaagtttggtgaatttcaagaaaaaaagcaacttaacgccgtcaaactttctaaacgttcacactgcatttattagccaacgtgtacttaacggcgttatcaccgacaagaacaccagcagctttgtttccaagattgatgaacgcctgacaccgaacatggatatgatattttccggtgatcaaagtcctcactttccacctcacggtcccatcggcgcgtatcatcaaccctacaaatccacgatctttctcctctcccaaagcgacggagttgtaaggtgcgatgggaaccgcagtcccgtagacgaaaggagaccaaacgttgacttctttgtggccttgatacgtcggaggaatcgccgtacgtagagtgatctgctggttcatgtatgtagcgtagacgtggagacggtcgtagtagattccgatcttggagttagggttacgagatgcgattgtgacttggaagtttgaagtaaggaggtttggttgcgagaggttgaaggcgtagacggtggcgtcttggaggacgaatcttggtttagtgggcctgagtatgacccaaactaggaagatggtgattagaactattacgatgaaggcgattatggcggcgcagagtttccggacgactacttctttgccaccaccgtggttaccgcaatcttttgacattctttatttacgagtttgccactgctgtacctttctctctctctaaatgttatattttttttgtttgtgtggtcgtgactagtgacgatgggaagaaatatgtgtatgggagagatggttgtgtatatttatattattattgtgtgtaaaagccatatgtatgcgcgttttatatccgttgtgcatagactaatagacttaagaccattaccaatttgtatatttattgttacatttaagctctggtctataagcttttctaaaaatgtaatgatcttactgttttttctttaactatatggtacctttgtgtaatgtagtttcaggatatgttggaagaaaaagtaaagaaatggttatatgtggtatccgtttatttttcaatttttatgtatgcattaagttttgggaaatggcttttagtgaggttttttatctgtcacgtcagttttttttattttatttgttgcgatgatggaagtttccctcatgattgattctgttaaaagacaatgcatcatttttagtgttaactatgtagtactaatattttattctaatcaagaacatggcccatgtcatgtgcacatattctagcttattcttcgattgcatttttgtaaatccaagagaattccgtaaaaaattaaatactgacttacacacgtgtcattttaccgttggggtttggtagagtaatttggttgttaaaaaagagtctatggtccaatctcattatgtggtttatgtgttcgaagaaaaattggcaggtcggcaatcggcatttacggggtgtgttcccacgtggaaacaaaatttatagtatatttcctggttatatcgatgcttatttacatactcggtgtcggtgtttaaatttcttatatcaaatttccacaacatttcaatttattatcgttttgtagaaaaacttctatgtattattatattgctgagcaatcaatattggatcttgtggaagaaacttagaagaccaaaaagtgaaggcgactgtaaatatgaaacaaaattttcgcaaaaaaaacattggagattgatgctaattattaatcgttagaggttaatagtataaaaacgataattaaaaaagttttgtacttttgggatacgtatacttttctggctaatttaggtggatgatttatatttgcaagaaaaggtttttgagtttctagtattgattattgctcagttaaggtgtatacataaacttgtgtttgaatatattaatcatatgtcacctaccgctactctcctagtcctagccaccgatacagttcatcgatggccaaactcgtctataggacaagtcaagtgaagtgaatgcaacgttagaaccatataaataaatagtatatgtatcctaaagaagaatattattccgaacatccgatacactgcctaacaatggacaaaagtaacttattagatagaacaactttaacgtgtttaatattgttctgaacagtgaacactgagcagtaatttacattattgttgtgttgtgttgtgttgtgtctgcgtcggacgttgactattgactcgaaaacaaaaacacgtccccgccttttctttcgttaagggtgggaccaaagtggtcacgttaaaagctacaatttctatccccacagctcaactagagacttcgaatatttcttaaaggtacatttgatcataatgcaaagtgtcttttccttcgttacattttcatttgttaggtttcattacaaaaagacaaagcaccaacccctattatttccctttttaatacacatcaccaacgaatctttataaattatgcttatagtagtcgcctcttgtgtgagtgagtgcacttgtagataatcgcatttgattctaatcattataagtaaataaagtataacgcattcccatgtaggcataatactaaattggcttgatgtcccatacttggtttagccattatttaacttttatttatttaaaaatagacagatcataaaatttgatggaagttttaactttttcatctcacaaaatctgtatataagcataaagctaattcaaataatacaaaaaagaaagagattggaggtaaattttcttcagtatatatttctgatgcatgcggtgatatttgaatatcgcacacgcatgaaaagttgcggaaaacgaattttttgcatcggtatcatattaaaggtctccaaatattaggccttcaacaccatcaaacgtgttacgtgatgcattaccttagatatttgtatatgactgatctctttttttttcttttttttgctccacccataatagaccgaggatcgagtattcgagtggcaaagtgttgagaaaattttagtcaacaaagaaaattttattaaacaagaaccgattgatttctagagccaaaaatgtccgcttagacaaagaattggcttattgtataatacaaatatcaatgaaagcaaaaactctaatagtattcataggttctccaaagtggatgagctagattaaaattgaaaataactagacaaagaaacaaaagaataaattagaccaaaaagtggacaaacattgaaaaacaagtaattagcgaataaaatgattttcattattcttgatgcactaaatctctttgatatacttgtattcaaccaaaaaaaaaattcgatgatcttgtaggcgtatgatttgatttaataacatcttaaattcttttcttgagctaaattgaaaaatcgtatctatttttttctttctttcttgaactttactgtacgaagaattttctatgagaatttgtatagtgaacattcagaccaatacatgaattaaaaagagagatatatccatagagaacaagaattatcaaacgtaaaccacacaaggaagaggcttaggcaacaaaacggcaccgtttccagaaattccttcaaacccaacttttaatttcccgcaaaacaccttaagcccgctctcacgcgccgcccaaccatcggtcttaaaagtaacccacacggccattctcaggctaaacgtcaccgttccggtctctctctctttcttcatctcatcaacaacccaactcggaactttcggttgttctttatctcccgcggtcaaagtttctccgatcacaaccgatttcttggtctccacgaaaaccggttgaaaaaacgccgtcgctaaaaattcgtcttctccgaccgcgttttggtggtatactaaaccttggattcgatcaaagtagcctttcaatttcgtgttttgattctcgattgtgagattcgccgtccattgcgcggagaaaaccggaccggttacgttgaaattggaaactgagaaattgtttacggagaaaagcggtatttgaggacggaggactagccacgttatggtggtggagatgcagaggaggacgactaaaacgattaaaccggtgaaaattcctctgacgaacccggacgaagctggtctttggtaaaccggattttgctgagccgggtaagatgaaccgtaatatgaagcgggtggggcttgtgcgtaagggtattgttggtaaggtgcgtttggataatttgggtatggtggaggcggttgatggtagcctggatagcccattaccggcgggtacgtttgctgttgcgtctgcggtggaggcggttgagattgtggtggaggtggtggtggttgattaatatcgcgttcggagttttgacccggacccgtatcgggtttgggttgggtttcttcttccggaggagaaggcatcgttgtgtctccctcctctctctttttttttcttcgactaattttgatattaatcaatttttttccgggagattagtggaaagcacgaagattaagcatattttgccaaagatttttctctgtctttgttttttcgttaaagaatacaactctaataaatttggataaaaatagtgaatccgccatggctgagctaaaattagaactatactgcaaattttgtgtatccagctaaactttaaaaccaaagcctaaatctctccatcatcaattcaaaaattccacttttgtttaagatattagaaatttagtgatggatctgtcaaaagtttccagggtaagatattggaagtgaattggtagctataataatgatggaaaaagctattattagtaaattatgtcacttcttatggctaaggatattgccaaagtaagcaagacgaatctttcaacttgcaacttttaatttttaagtatgtgttttgtccatattattacaacaaacagtggaatttatgtaacttacagaccaagaaacaagacttgtgccaagcttagatagacaaacaattgggcctttgtgatgaataaaaactaaaactatatattcatttgtaattctcagtattgatcctcttgaacctagctactttcagtttgtgttctgcgtccgttaccaaataatcaaagatagtggtttgtgaatgtgatgttctcttcaagagattgggcctcagttataagatatttaaaaaggccttgtagaaaaccatttattttcttttgttgttagacgcaatcattgaacacgctgatctcacaagatgcgagattaagaattaacttgctagaatatactactgattttccttcttctttttgacaacgctagaatctgctagttcaactcctagttttcttttatgaattaaaacaattacaatagaaatataataaaaatgaaaacatattggttatgtgtccgagaagatgtagaatagccaataatgtgaggtccaacatttctttatattcaatctaatcccatgtggtagcctgtacgaagctgtctatttttctgaccaatttttattagttttagctgtacacacttcattaccaatttttggtcccaattcaatataattcatctctacgctacacattcctatttaaatttcgtataagtactattttgacatactccaacgtggtaaattgccctatcatatcggacccatacacacccataagggcttaagacttgaattacttatcaacttgtatccgactacttcaatgtatatccaacatgctcaaattatatagaacaaatcaacacataggaagaccatgcgtaccatttcccaacttgatatactaataactacattatcggtttcaatatatagtatttaaaattaaaatgcattgtatatatatgataatatctaattgacttaatgttgttgtattgatctctacaacgttttttttttactattggcccatatccatcgttacactagattgaccaaaagtatagttatctttacattttgtcaaaagatggacaagtcattgttttctttaaattaagggatctcttaaactaaaacgttttttctttttggcacatagacaaagttataaaacggccgcttgtttctatacgtattggtcattttttgaccgtttttgggaattagttaaatactaaaaaaagtttgatcaggtaagtgttcacatttgttgtcgagagatgaacgtcctaatccccaagttaatatttgcgttattggtgggacgtaactaagcatacttaatattcggtttgaaaagtgaaaaaagtttaaattggacaactgaataaaaaattacacataccagaatttattattgcttactaattgtatcatgtttgttggagtaaaaagtaaatggattaacaaatatttataacctataagtaaataactacgaactacgacaagaaaaaaaactacgaaataacttaataatgatatttaattcgtaaaaatatttgaaaacactcatataatagaaatgatgaaaaaattcgaattgaaaatatagtctgacttctttacaaaatctaatttttaattttggtcattaaactgaaaaaaacgttaaacggccgaatgtaaattctacaaaatcatgtgattagtcaaatagtttgaaatggtgtttaacactcccttttttatttcacggtttacaagaacgataattcttttttacaaatgaagatttgttaacagaaattggcgtgtggttaactgattggaaccggacatttataaaataaaattctcttcaagatttcaataaaggaaatagctaatcaaacaaatcaatactgtatttctttttttggctacatcaattagatcacaacattaatgtatacacagttgaccaaacaacattaatgtatacacgtacgtatagatgtatatatatactgtattatgtcaacatacagtacgtatatgtatttatatatattcttaaattttattaattggctgtaatatatgaccgctgctcaaagaatgggaaagagctatttgtacataaacccaaataaatatatatcctcaagattgaagtcaattatctatctatttggataaattattattttgtggttgaatgaattgctgattagtagcatatatagttgcaacttggtcatgattctggtcgtgctcaagagttgcctaacttatttctatttttcaataatatcttaatttaacaaaaagatggaaatatttcacttcagttctgtgattctgttatactttcatatattttccaaatttccaaatcataagaatactatcgagtttctataatcaggtcaaataagcttgaaacaaataataacataggttgaaatagttacaatgtaaacagcaaatggcttaaagtcttaaaccaacaattaaagactcatgaagaaccaccaaagccaaactatgacaagagaaatatcagttcatttgaaatcttaaaaggtatagaagtgttgattaaggataacggactatcgatgatatcctcttcgtatattttttttaaaaaaacagcagaaaatctttatcatatatacacttttcattccgttacttaaacgttagtaaataaccaatatcataactcataagttcattaatcatagggtatataaagctgtaaatcatattatgttgactttttcgtaatatatgcaatttttaataactaaaatgtttgaaatcgaaagatgtctttggaaaacacaaagtggtatatatatatagatatagatttggttaaaaatgtatgtaattctttaaaaatgacaatgtttagagtttactggattgtagaacctatggattttgtttaatggcaaaaacaaaaatggaagtaaagatgtccatcgacagatcaaaaactcatatatattgtcaagatgaaatgatataacgttctataaaaacattaagtgaatccctgataatcggaagaacgataaaacaacttgaagagactgagttatcaatgtcccacaagtggtaccaaaatagtttatgcataccaaaactatttaattaatcgaatgtaattgaccaaaatagatatcagactcaaaagaataccaaaacttcagtgataaccaaaagcagataaaaaacgtatatagtttatgcatttgccaatagatgagaggcatatccattggcactaagatcaaagccaacatatatataaagataaaaggaaaaaagagaggaaaaataactgaaaatatgaatatccaaaatattgtggaagcgcctagacaaaagtagagcataacaagggagtatgggtccaaaagtatcacaaaagattgcatcctaaaacaatgtacaaaatccaacaacggaccgttaatggcactttaggttttgtcggtaccaaaaacagtaatcttctttttgttgacaaaattaaaaacctaaaaatcttcatctacctttcggttgattaacagttatattaaccatagttttgaaaattgaaacaagccagccaatttaggttacaattttttgtaaaatgaaataaaaagtcaatgggggatggcaaaaaaagaggaggaataagcaattatggcatgtgagtaaaacgaaaaagagacacaaaacagacaatctatttgtcttcaacaccgccacaaccaatccccaatgacttggttactttttacactttcttcgccgttatcgcatctcttttgacaagtcaacactcttcatacgtctcacttttttttttaatatgagaaacgcatttatagtttagtttcttttgttacaccacccaaaaaaaaagtcaaatctatatataacgttcctcgttcgttctaataaaaaactatacaataataaataaatagcgacagctatccaaaaagagttttaacaatacttgtattttccgtgttttgacttttgtaattattctgaatatttccactatccctttatatttaaagacccaaactcttcatctatcttcttgctaacttattcaaaccaattcacatatctcctaaatctcaacgactgcactttgaagctttttgtttagattcgttcgtcgtttccattgattaagtctacttcttttttttcatattttcgagcgggtcaaatggatcaagagatagagattccttccttcttcctttgtccaatctctctagatatcatgaaagatccggtgatagtttccaccggaataacctacgaccgagaaagcatcgagaagtggctcttttccggtaagaaaaactcatgtccagtcaccaaacaagtcataaccgaaactgatcttaccccaaaccacactcttcgccgtttgattcaatcttggtgtaccctcaacgcatcatatggtatagagaggatcccaactccaaaacctccgatctgtaaatcggagatcgaaaagcttatcaaagagtcgtcatcttcgcatctaaaccaagtcaaatgcctcaaacgacttcgtcaaatagtatctgagaatacaaccaacaaacggtgcttagaagccgcagaagttccggagtttttggcaaatatcgtaagcaactctgtagatacgtataactctccttcttcttcactttcttcttcgaatctcaacgacatgtgtcagtcaaacatgttggagaatcgatttgattcttcaagaagcttgatggacgaagccctaagcgtactctaccatcttgacacatcggagacagccctcaagagtcttttaaacaacaagaaaggaacaaatcttgtgaaaacgttgacgaagattatgcaacgtgggatctacgagtcaagagcctatgcggctttgcttctcaagaagctcctggaagttgcggatccaatgcagatcatattgttggaacgagaacttttcggtgaggtgattcaaatcttgcacgaccagatctctcacaaggcgacaagatcagcaatgcaaatcttggtgatcacatgtccatggggaaggaatagacacaaggcagtggaaggtggaacaatctcgatgataatcgagcttttaatggacgatactttctcatcagagagaaggaattcagagatggcgatggtggttcttgatatgttatgtcagtgcgcagaaggaagagctgagttcttgaatcacggtgccgctattgcggttgtgtctaagaagatattgagggtctcacaaataactagtgaaagggcagttagggttttgctttcggttgggaggttctgcgcgacaccctctttgttgcaggagatgttgcaattgggagttgtagcaaagctgtgtctggtacttcaagttagctgtggtaacaagactaaagaaaaggctaaagaattgcttaagcttcacgctagggtttggagggaatcaccttgtgtcccaagaaatttgtatgattcgtatcctgcttgaacaacgtacatgtttgaataattctcatcagatacaaacaattctttgagaattattcttcgtataagttcattttaaaacaaaaaagagtggtttaaattttgctcaaactctgattttctttcatttgtttttgttttattatctttcaatgtttatcattatgtgtagataatagtggacatattttcatgaaattatgaaaaaactgcaaagaaataaatggattcacaggttacatggctattttatcccacttgctttgttcgtaattgttagaggctccttatttatattctttttgtccattactcacaataataatggagaacatctctttcaacttctcgtttttattgagtggataacctaaaggttacatcatagttctgctaaaaccattactttttacaaatacttttagagatttgtatgcgtcatgtgtaacgtttctgaccatttaattgatgccagaattgtaacattgcgaatgtaattatgtatatatatatatattatgtcggtacgttctacaactctaatcccactattgatttatatattccagtatacatcgacgatatccacgacgggcattctttcattcgaggatgagtttctgttttaagaaattcttaattaagatttgttttcttaattattatgtaaacataccaaaagtccttcatatatatgtgattttgtattcacttattgtgattttttagatcactcagtttaaaatgatttagactaaacgtggtaaaaactgtttacgaaaactctttgcatgcgttttaacgatcaatagacatttcattatcggtagatcgaaggcaaaagatagatgaatataggaatctaaagcacgttatagcaatattatatagcaagaatctctgtatttatacacctcggttctagcaatcagggaacatggtcttggggagaacatgagtacagtgtcgttttacctgagaaaattaattattactttcgggctataagtccaatataaattcctaaggttttacataaataatcgctcatgtcaaagttaatttggattacactcgaatttactcttccaacactgacttatgaatttgtctttatattcttttattaatataatcaggtatatctatacatacttgatagttgatacagatcaatttcagaacatgcaattcaaaaaatataaaataaaataaaatcgttttatcagaatcgacaaaaatattttggtcgacgttgatgaattgattgtttttttcttctatgttttttttttaattattttttttatcacaagactagatcatagaatttacttcattgtaactcctaacatttttatttttaacaaaatatttatattcttaacaaaaaagcattcaatataagtgtaagaacaacagcatatgttaagattgaataaaagtgtaacacacatgagcagtaacatgggtggtccagttacagtgtgttttctagttaaaaatcaaattgtaatctccttttagttattgagaataatttatgcaccaaaaacatgaaatcctattagcaaaaattaagacaccagcagctgagtattgaccatcattctcactttatttggctatatcacattatatatagggacttgtataattttttctaaaaatacttaatttttagttgtatataataaatgtcatgaatccaaagtcagatcttacgagcaaccatgtcgcaatctaaataagagttaaaaactacgaaattggcccagcctcgaccacaacttgcagttgtagttacaacgttatggagagaatatccacagttgacaaaactttttgaaatacatgcgcgtgacatatatactacatccacaaaaatacatgcgcgtgtatgtagtaggttcacatataaatgtgaacgtgaaggactagctagtgtataatgtatggttataagaacttgtaatttataattccatttcatgtaatgttaaaatgttcaaggacgttaagtcgacacgaagacttggattacatggcggtggctacgtttgactcgatccccttttttgttttttttgaaagcttattttatgtcaaaactgtaattttgagaattttttagaaaattatttgttttgtttgctgatattaatttaataatttaaaattaatatgagaatcatacattaataaatgtattgctcttgtggtttggaaccgagaaaatatctatgatgcgttaagaatttacttgatatggttaataatttcatacaatgataatttaccaaccgaaaaacctcattgcgtagaattagacaaaaaagaaagatagttttttttttttttgtaaacagaaaaaagaaagatagttataaagagttgtgtagatacaaagttttctatattctatgatctttgagccattacgtacaagaaaaatagaaaatacaactaaacaaaagtttcaaaatttatacttctcccttcctaatccaagtttttccatacacaagctttcccaaaagctgaaggttatacataaaattaccgatccgttaaggctagctaatttcactctataatgtaggctaacattctgaaaaaagcagataattatctcaatttgatatcttcaagtgacaaaaccttagaaacagatatatacaccaagacaagactttggtttgttaatctccaaaccctagttctaccaaaaaagccttttagaactctgtttcaacaacaatgaaatggcccatagccaaatgatcacctactatacgtattgtttttctgagattgtttttcagctaccctcaaaagcatattacaaattaagcccgagtatatctctcagtattcaaccttccttcctgatacgattgatacattaaatcttcagttttggtaatcttctctgcttcttcataatttcatattcttccgatactcacctccacgctatctccatacatttgatataaacttctcaagccaaagaaaactttgatatgccatgcaatcctcttcatgcatgtctgatcagttttacattcatgtaaccatgtagactataggaacaccagaaactatttctgcttgaattactttatcagagtctaagatcagtgtttaagtatcatgttgtctatagaatagttcatattctcctccacccatttcaatctaaacaattcaaaattttatttaacaaattttaaatgcacaactgttttctttagtaatataattcttggatcaagcggagatgtatggggaacgtgtgtgacacgaagctcgatgatgaacaactttccaagttaacttctttgccgcctacctctgaactcaagttgcgtaattttttccattctagctcaccaaatctatagtattttcgtttttttcgtttttgacaatttattatcgtttaggtttcataatactctgaccaaaaagaaggcttccgtaatgtttacacaattaatgaagtaactagattttaacccgcggtgtaccgcaagaacaatatatttttaaaagttagtatacataaaagtttgtaaattgtatctatctataaaatatttttattttatagtttacaattgttattaagtaacgtcctgccaaacccctcccgccaatccgtcccgtaaaaaaaccatttattttattaatattgatcttatttatgatatgtttatgaattattgtctaaatattttgtaattttatagtaagtaaatgctatcatatatctctgcgatttgatgattataatcgaattgttatagtcatggagaaaagcaatatcaaaaatgataattttgtagtaattaaatgatattaaatattttgaaagttttattttaggaactaatcgtgtagttaatgtggagagatttagggaacattgttaaatgccaaatatttaattcgaatattttttttttaattatcaaaatcaaacattaaaatccagtgacagccattgtaaataagtctcaattacaggatttatttcacaaaatggctgtaaaaatgtatatgtacattagttgtgtataaacattaaaatgctgttgaagtggcggtgttatggtagcgagggtctatcttcgttcttgagagatgagttttttgtttgcctctaacagttggcaatatgaataggaatacgaggcttaagctaagaaagtgttcaattcatagagaattggatttcgcatgtaaacggcctaaattgtatttataaatctctaataaataaaaaacaactcttgtgatatatcacatttttctttttcttttcatgtagaaaggagttgaaagaaaagtaggaacaaatatgctctttctctgacactccctttttggagaaggatctacacaggccagagatactaacaggctctcacacgtgcaaccgtgatacacgtgcgtctcactttctctgaattgtacaagttcaagtaacgaagcaaatctcaatcgaatccaaagacaaggacctccacgtgggattcttgaggaaatcttcaaaacgactgaataaccaaaataaataatgatctgtagagtacacatattattaccccttaaatttgtacttaaaatttatcgactttcttaattacatgaaatgatctatagaatttcatataatcgtgtatatcattctttgtataataggtacaataacacaaattcataaatttatatgcaaatataaggatcatccatcggcagtgaaatcaaaagggctccaacttccaaacaagagattggtggaatcattggattcgtcagcgaaatgaaccaccggttcgtgtacagcctgaaccggagtcacgccaacgtctacatggttatgaccaatcaacaaagcatcagaccaaacaccattagtgtctaaagagagaagctcttcaccaggaaatggaggcaagccattataaccacattcctccacaatgtgttccaccggattaatataatgatcatgatgaccatcattgatgtccatactccatgaagggtccatggaagtgccggtaggattatctaccaaaaaatccgtagtggctaagtcgcaattttcttgtagtatagattcgtcaggctttggattcaagaaattggcgtaaacaagagcaagatcgatgcttggtgaaccaccaccggggttgccagaattagcggttaggctagttttagtattgttaccagaagatgatttggggcggcgggattttcgacagccaccgcctacaggaacattgcggagggaaccacctttggtccaatatctgcggcagcctttgcagaagtagcgaggctgagtgaggctatagttgttgtagtaacagaactttgtgttagaggatccacatcttggacaactcggcgtgatctccgcgtttgcgtttgcgtttggccgccatataaacgatgatgtcaaggcctctgctctctccatatctctctcgctcttctttagtctatcggaatacgaatgtattatatacgcatgcatgaatgtgtgggtgagagtttgtgcatgtggagagtttgagacgcgtggaggctagagagtggatgaagtttgggggagcaaatgcctcgtaagggtgcactcactgttgcttcttgggggagacagggttaagggttttgaatctttgatagatatttaaatactagtatttgttttttttatcataagatatgaataagaaaatagatcgtcttggagattgtttcgaagggaactaagaagcctatggcctctttggagagatgggttattgggtgtacattgagctatttgtacggcttagtttatggatgctgcacgattaatatatgtcttttaaaattaatagaatgtacttacaatcatattaagtaaaatattcatatcaataagtactaaaccatgagttatctatattgcaacattttctattcacattatattcgcgagaggacgatgaatatttggccagagtcgttaagaatcagaacttgtagataacgaatcatagatagtcataattatataatagtatatagtatgaaaatggtatgtaaggtatgcgtaacgatctgtgaatagaaactatagaacgagaaggtgaaacaagaagacacaagttttgaagaacaaggactgtctctatttgtctacttatttgacttgaatttatttgatttattaacccacagaaaaatggggattggaaaggaaaatctgaatgggataaagagcttcttggatcatgtaaatattggcaatctccaagaattctatgtagtaggtcttacgtttttctatatatttgtattctaaaattcctgaaattagatcaccatcacactacatgttggttttagagtaatagctttacttctcaccaaaaaaaaaaaaaagagagcaatagctctacatgagaaactctttgcacattgcacaaaaaaagaaactcttgcaaaacttgttgaacattgacgataaattttgttttagaatatatagtaacattcatcagaaagtcttgcataaacatgatgaacaacaatgatacagattgttatatagcatatcaaacattcgatttgctattagtcctactaagtctccattgcgtcactctcatcaacaaccatctcaatttcattttcataacccattttgcacttgaactctttcagattcgcctcccacacactataactcgagttcttcgctttaacatccaaagaaacctccttcttcgtcaccaatgtattcgcataactctcgaatggaacaatcttttcccgtaacaaagatctcctctggggatcactactctcttttctcgcctcatccaaccactcttttgcttgctcaagcttagcccaaaagcaagtatcttgcgttgtgctcgcgtatctgcttctcacacactcctcaggcactttaactcctttctgccatttatcaatcacctcataccttttaggtctattcccctccaagtaatgcccgccagtctttatatctctgtttttgtagaaattcgcaatgtcgagtggctcggctaagagttgataaaattgagatgcgtaaatccatttctttcctaaatgaaaatcaaaaggtaactcattcgtctccaccattttaatcactgtgtcccaaaacttagctagtcttatgcgactcatgttcactttaaagtctctcttcaacgaatatcgtttgaagaaatcgtagtaacctagctgctcttctgatgcatcgcaacgatctttgtaccattgaatctcgagtcttgctggcaagacactagcaagctcattggctaactcagctgacctcagaataggagcccgaacaattcttgtagctgtttctatacattctttgactaaaacgccacttgtgtcatcgttagagaaacctagagcttcaacggctaacgcaacaccagcttggtagctattgtcggggatactcccaccaagaaagcttctagatttaagaaacatgtgtgaaagtgtgaacacatagtgtccgtacctctgatgttcctcggtgttttgagttgctgtggtgttgaggatattaaacatcagacgaacagaaccagcgttgtctagacagacacctcctttgtcggaacagaacaagtaagttccaaagggccagaattgttcattgctgcttctaggaacgaggtcgtggatggagaccacgtggcagaagttgtgtgctaaacgtgatcgtgaaattgaggtggagagagattggtttccgagcagaggagagccaaaggtgatacaaaagacgcggaatgacggcggagaagattgagatagaagccaaagtgcggtgaaagcggccaatgcgccgccggttgaatggccggttatcaccaccagctttttacctaacaattccaattccaatccttccttgatctgcacgttaatgcagtcgacgttactgtaaattggttgactaacaagaacaaaactgattatagattaccttccttctgagtgtacaatttcctctaataatgtaaactgatttagagactaaatttgccaattacttggtttaaccaaatttgaataaaaatcagttaagacacctctctagacttaccatttttacaacttatatctacattaatggtcacttcttgttttttctactcatcaaaaccaataggaacttgtttttgttcaagattttcatatccttagagacaaaacaaaaactaaaagtattcgacgaaaaagggaataaaatacatgatggtgacacaataatcatgggttaaaaactttttgagcgcacatttataaacttcgccgaggtgtgttaaagcataaagcgtaaagctaccaattccattaacattttttgttttttttggtgtcaaaaataccaatgacgtttcactcactaattagtaaattttttaaatcacttgggcggacggacgtgatggcatacaaaccaaactttcaattgacttgcttatgatatccaaaggtcgcgacaatgacatattccaaatggtggatttggaataattgtgtccacgaatctttttagaatttcttacaagaaaataatttttatttattatctattgtctattgcctattggggtaggtggtggtgatagtttataataatcttttaaaaggacaaaaaaaacctccatttggattataattcatcaaaattcagaggacagagatatttaaataaaaaatagtaatgatcatcagttctactaaaaagtactaaaatacgtaaaaaaaatagtaactttaataggtaaaattcgttttcgcaaatccaaacgaataaaacttatgatagaattttgtttttttttaaaatcctttgtgaaataatttcccatattagcatttaatgatttttgtatttttctctcgaggtattattaattgaaattcaaatatccacatgccttgaagataataaataggttaaattgcatccaatagaaagaaaaaaaaacagaggaagagaaaacaaacctttaactgaagaaagagtttgagtatggcagcgtcgaccataggtagaggttcatcggaggataagccggggaaaagaacatctccggtgactggcaagcccacaagattccccaactgaatcatcgataccgccggtatagcaacgtatgtaatcccggcgatgtcatggatctttatactcccgttgcaatttgcggtgttgcatgaactccaagaatcggtaaataaaggagtcgatatcattaccgaagcttgcaactcactcgtctcgaatcgacaatcgtccatgattggatatcgagtagagagttgcagaacgatgatgtttatgaagttgtaaatatattacaagcaaaaagaaattatctatgtatcttcttggcttgttcctatgtaatttcttggttttggtctttgctaagtcgtcttcttcaaagtctcttactttaacatcataatttagtaaaattgtactggttttataaaataataataaagaaatgctgtgaaaggtaggtccattctcattttttaatcattgtgtgtagaggacaaaaaaatatgtaaatatatagtagaagaaaatgcgaatcaaagcatgtgatcctatgtaatcggaatggtttagacttgagcataaattgacaacttttgatatgcagaaactttggtaagagtttatctatctatctttcatggaaattgcagagaaatcaacctacatttgactcagacattttgaagtttttttggctaagcttttaaaaggaaccaattactttcagtttcagcttaacatgatatagttatacaatttggcccatataagtcctacaagttagacccaccatgacttgaggagatttttaagttgtggtctacctctactagagagatatagatacttgttaatgaatttgataatttactgtttggaaaggtttatatctaatttaacaaaaaaacaaagcattgaaaggtccatgccattgtcatcttttaatctctgtttgggatctttgtggaaaaacctagagtacaaaatggggcaaattatcaaaacaaaacaaaaaaggtttgaagaagaaatatctgatgattaggacttaagcatgtattagaaaactcttgccttaacaaactgataatgataaaagagataatctgaatcctaaatgtcaatgaaactatccaaccggacaataatcattgcaaagctaccatctatagtaattttcatgtaattttctggttttgatattttcctgaattggagtaaatattcaaattaaacaatgaacttctataaccaagtctctccattagagactagtagtacattttcttggtgttttctcatatgatgaagtcagtcgtcgtccaaagttttctcaactaaatgatgttaaacaatcaatctgacacatctttgtatcaccacatgttatcgtctccctatacttatttagctaatctgctttatctataaagcaatcttgtaattgtcaagtttgatattttgctctaacatgcttcttttcaagagatacgtataatcgaatcataacttaaaacaatttaagtacttatcggattcctaatctcttcttccaccttaataatacagctcgaaactttatacaaaatacgaaaaacggtgtaacaaatcatgtatgaatattgattagattaatgattctgttatgcgattgaactacaataacagattcaatatagcagacttttccaaaaattgatgacaaataaacgatcatgactcaaaagaaattgctcaaactgttatgattaagaacacatggattcatcagttacatgaaatggattgaaatcagtaaatctctttaatctgataaaaccctaattttacaaaccctctttggatgtggttgcagtagcggcggtgtcgaagtcatcggggtctttggttgggtcagatttgtcgattgaggagcggaatttatcgaggaaaggcttgaaagcgatctctatggctaaccatcctaacgccatcgctgcgaccaccacagtcgcctgtttcgctcccgaagtttttcccatcgctgcgtcgtcgtcttgttcgcgtgtcggtggtatcaaccgatggtttaagatcgggagatgggttttactaggatgtttaaaatgggccggtttgggcttctcattggataaagatagtttgtttgttaaactatggcccaactttttatccgtctattggttaattaatacaaactttttatataattgtaaatataattgaaaggatccctattttattttcttgggaatatatatatggaaaaaaacaatcaatagaattagataaatagttcaatatatcaacaatttcttttttgttaggataaggaacttttaccttttttctaatatagttacaaattgtgtttttttttttcttaatttattatcaaatttcttttttacttatatataacctcctttttcatatagagttattaactttttcattttctcagtaaatgtattaacaaatttagacttaatacatgaagacatctaatatttttattgatatgtgtcgtgaactcgtgacatgttagttagtaatttttataaaaaaaatttagataggttaaaattatttgatatgtgtaggggtgtcaatgggtcaaaatttattggtcaactcaactcaacccataaaccctaatgagttgaaaattttgactcaaatgagttgatgggtcaaatgagttgatgagtcaattggtttgatgagtaaaatgagttgggttgtaatgattaatggtttcaatggtttacccaattaacccatcaagttttgtaaaattgaattaaaccaactaaaatttctaaatcaatgtcaatttaagtctaaccaacacatctaaaccaatttaataaaattaatatttttccaaatttcttaaatatacatgcgatgaaattgagaaaaagtaaactcgtaaattttccaccaaaaaacataaacccgtgattttcccgccaaaaacgtaaatccgtgattttctcgccaaaaacgtaaacccgtgatttttccgccaaaaacgtaaacccctgatttttccgccaaaaacgtaaaccagagattttcccgccaaaaacgtaaatccataatttcccgccaaaaacggaaacccgtaatttttccgccaaaaacgtaaacccataatttttttccaaaaacgtaaacccgtgattttcccaccaaaaacgtaaacccgtgattttcccgccaaaaacgtaaacccgagatttttccgccaaaaacataaacccgtggttttcccgccaaaaacgtaaactcgtaattttgacgctaaaaacgtaaactcgtaattttctcgccaaaaaacgtaaactcgtaatttttccaccaaaaacgtaaacccgtgattttcccaccaaaaacgtaaacccgtgattttcccaccaaaaacgtaaacccgtgattttcccaccaaaaacgtaaacccaagattttcccataaaaaacgtaaacccataaaaagtagaatccgtaaatatcctaagtttgatgataatgaattaataatgataattatttattattattttataatagtaattaagtaaattattaattaaatgggttaacccatttaacaactcaacccatcaaattaaatgagttatgagttgacccaacccatttaacaaaatgagttgagttaacacataactcatttaactctaaactcatttgattatgagttgggttgagttgggttacccattttgacacctctaaatatgtgtctctagcctctactatttttaaaaactaaattttatataataaatttttttatcttaataataaccaagttgaacatattttagttctaaaattaactactcggtttaatattaaactttagaccaggacatgccggataacatggtcttagtgttgtcgtacgtcaccattagagtttcaatttgcataatacaaggtggttgacccaataaaagaaatttgattcaatttcgatataaacaggtttgttttggttcagttttacctattactttttattttgtccaatcccaaaactattatttcaaagacaaattggagaagaaacaaaaaaaaactaatggttggacaaaagattattatatatcaatttcaccacaaaaaacttagcattaaaatattcgaaatggacagcgacgaattcaaaccttcgtgttaattgtctccggcgactatgaattctaaaatcttccactttgcctaaaatatcaatacatcacattcatcctagccttatccactctttcttggaaattctggtctggtttcccttcagcaattcaattaacttcatcaaaccgaccggttcaaacaatcatctagaaattctattttattgttagactagatcatgaaattttgaccgagtcagcacacataaaatctggtacttgacgtggtttagttaacccaacaaagttgttttggttaaacggatttattgacaaacgtgtttcggttcactcactaaaaaacccggttaggtagatactacttcattgacaacaaacgaagcatcctttaatttcaaaaccgcgttttaatcagacttttccttttttattttcagttctaatgtttaaaactttccttttctttttctccatatttgactcgtcaatataaatacaattgtaacaaacagattttgatcaaaagattttacttttctcaattcctttcaactttcaaaatcgaagatctcttaagccatgaacgatcttctctccggctcgtttaaaacctccgtcgcggacggttcatcgccgccgcactcacacaacatcgagatgtcaaaagcgaaagtctccggcggaagttgccacggtggtaacaacctagacacgttcttcctcgacgtggaggttgtaaacgaagaccttaaagagctagatcgtctctgtcacaacctccgatcgagcaacgaacagagcaagacgcttcataacgctaacgcggtgaaggagctgaagaagaagatggacgctgacgtcactgctgcgcttaagacggcgaggcgcttgaaaggaaacctcgaggctttagatcgggctaatgaagtcaaccgaagtttaccggaaagtggaccgggttcgtcgtcggaccggcaaagaacttcggtggttaacgggttgaggaagaagctgaaggatgagatggaaaaatttagtcgagtgagagaaacgatcacgaatgagtacaaagagacggttgggagaatgtgcttcaccgtcaccggcgaatatcccgacgaagctaccctcgagcgtctcatctccacaggtaataattttttccaattctttcttaacaatttttttggtcaatttcaaaattcaaattctaaacgttaaagagcaagaaaatagcgcaagttgttaaacctttttaagaaattgttagtttataatttggttaaatcatgatattgatataaattggaattatattgtaggtgaaagtgaaacatttttgcagaaagcgattcaagaacaaggtcgtggtaggattttggacactattaacgagatacaggagaggcacgacgcagtgaaagatattgagaagagtttgaatgagttgcaccaagtgtttcttgatatggctgtgttggttgagcatcagggtgcacagcttgatgacattgaaggcaacgtcaaacgagctaactcgcttgttcggtctggtgcggaccggcttgttaaggcacggttttatcagaagaacacacggaagtggacttgctttgccattttgctattgctcattattgtggttttaattgtggtgtttactgttaagccttgggagagtaatggtgggggaggtggaggtgcacctcgtcaagctactccggttcaagctcagccaccgccacctccggctgtgaatcggcggctactacgctaaataattttttttttgaggttccctctgtctatgcatgagcatatctatgttttgaagattgttttttattttacagtattttgtctttaatgtttttgtaatgttttggttggttaaactctgtgtatatataatgcgatcaccacatttctttgttttattatggaacgatttgcttattttttacaatcgacttaagttaatttgaccgtctatgatattattattcggagagatctatcaaaatcgatggtcaaaatgaatttccagagaatatggaaattaaaaaaattgaaatatatatcaaatattatcatacttaagtatagattatttacagttatctctatagtattatttacatttatatttattttaaattatgaaacttagattaatttgttctctatataaataatttagacaattattcttatgggagtctttttttttttttcactgaaatgttgcctttcattgataccaaattcttatgggagtctaacagtaattattcataaatacttttatcttcgtactcccataatttatcgaaccatattgggccgtgggaaaagccgattagtcatacaaagcgtaagaaaaaaaaaagtttcattgtgttgtgccattgtttcactttctctcgcaatggcgtcattgaagatgataggcaagtcaaaattaggaatcactcaaaataaatttcttcgattgattctcttttttctaatgtacaagattctgtgtaactcaactgttgtttcttttgcttttcttttgatgtgtttgtgtaagatcagacatagccgttaacttcacaggttagttgaggcatttccacaaacactttgtgaacatgtccttctctgatcaatttattgcacagaccatattaattctttagtctaattgaaacagatgggatgttcaaaggactttaccatggcaagaactgtcatgttccggatattgccactgtcttgaaccgggcttggtctgctggagtcgatagaatcatagttgagtcactccttattgattctttttgtttgaatgattacaagtgatagactttgagtaattcagattccaattttcctgaataggtaactggtgggtcattggaagaatcaagagaagctcttgcaattgcagagactgatggtttgtttgttttatagatctttttttcagaaagtttttagtcttttagaagtttttgattgatgtacattttttgcaggtaggctgttttgcactgttggtgttcatccaactagatgcaatgtcagtttttttgctttacatactcgagagtttcttgaaatctaaattataatcttctgtttggattgttctttaatgttatgttttgttgtttatccattaggagtttgaagagagtggtgatccggagaagcattaccaggctcttttttcattagccaaagaaggaatgcagaaagggaaggtgctatttcttctgctctagtagatactttgaattgctttagtatcgctttcgtgttgatcgtaatcaaaaccattcactgaacactcttgtactttatgatcgatttaggtggtagcaattggtgaatgtggattggattatgacaggcttcaattttgctcagttgatatccagaagaagtaagtttgatcataaaaagtttcatgtttacattgttttcttctatttgaaatatcttcctatgttttctttgttgagaaaggtattttgagaagcaatttgaactagcatatgctacaaagttgccaatgttcctacacatgcgagcagctgctgaagatttctgtgaaattgttgagagaaacaagaataggtgaacatgcaggctaatgatttttcgagttgtgtttagataaacttcctggattgattttttagtcatcttaatcccatgattcactttcaggttcactggaggagttgctcattcatttactggtagtgcgtcggaccgcgataagcttctctctttcgataaaatgtaccttggtaaagacttccactttttttctattagagactatgcctgtaggctttaactcgcctaggcgtttgtaggatcagatttggtcagaatatcttgaattactgttctggtcttttgttttgctgatgtgtattctatctgcaggtgtgaacgggtgctcgttgaaaacagctgagaatcttgaggtaatgaaaggaataccagtagagagaatgatgatcgaaaccgactctccatattgtgatatcaagaacacacacgccggaatcaagtttgtaaagtcgacttggccttccaagaaaaaagagaagtatgatcaagagtcccttgtcaaaggccgtaatgagccttgtttagtcaggtgagtgtagcttctagattaaaatcttgtcaaatccataagcatatacagtcttcgaacaattcttaggcaatcattttcttctccaggcaagtccttgaagtggtggctggctacaaaggacttggcgatctaaatcaagttagctcaaccttgtaccacaacacttgcaggcatgttttctctttttcggtttcacataatttcatgacagaaatatgaagaactgttctaacgtaaaacgttgtcttgatggcttgtcaatatttctgcagggtcttcttccctcaggacttagattctgctgcagatgctctgctttccgggcaccacgagaccgactagcattaatcgtgacagaaatttgcagtttactggaatcaagatatgttgttacattacaccatttatggattaaaaacattctcaataaaaattacaaacaatctcttgttttctatctcatatattgtcttcttcttcagcctcactagaacaaaacaacacatttataaagacaacaaaattttcatttttggcacctcgagcagatcagtctgaaacttatccggaatctattgtgcttttgctgcttcatgcactaacattcgaaagcacctcgttactctctagactggcctcctcggtttctccttcttctacggaaggaggagacacagtgggtttctctctctctgaagccaaatttagcctcagcgctcgtccttcaacttcctaaaaaccaaaactagtgagtctcaaaacccaaaccacccaaccaaacaagaagggagaagaagccttaccacgccattcattgtagccaaagcagactgaacattttccgctgactcgaacgagatgaaaccaaaccccctagacctcccagtatttctttcatagataactttagcaccaagcacaccaggttgatcaccaaatgcatcctttaaaccttgtgaggttagattccaaccaaggtttcctgcatataccttatgaggactatcaacataactccggttattatcacggattttggttctcattacttcgttctcaccgcctctcggcacctccgggaagttcactttcaccgttctaccaccaatttgctacaaactcaacacacaagagatcagaaacattctgaagctgaatcatctttgatcaaatgatgtgaacttacagagctgttaaacatctgcatcgcttctttagcttcttcaatgcttcccattgttacaaatccaaatcctctgcttctatcagtaactttatcataaacaatctacaacagagaacaatgctaacaattagacaatcttcatcctaattttgcttcactgtctccaaatcgattgatagaatcgtatgaagattagagacgaacctgaacatcgacgacagttccagcttctccaaaaatctgagagagctcagaagaagtgattgtgtaaggtaaattcccaacgtaaagcctcccttcttcaccactcgcttgcgtcgtctgtttttcttcctctacttcttcttcaccttcatctccttcttcttctacctcttcttcttcttctactgatgcctggatttcatcatcggcggaactagcttcggtttcggcggcgcagaagaagcggtggcggcggatatttgagtggaggattagtggattagggcaattggcaacgagtttgaaggattttggtgtaaagcgatagaagagttgggaattggagtgggaggagagtaatggattaaaggtagcggcggaggaagcggtggctgcggcggatacagccacggcggaggaacaataagctgacgacatttttctaaagaggtttgtgcctttgccgcgtggatgaggaagagagtggataagatatactgtatgttcttctcaacgatttttgatgaaagtttttcctacatttttataaaatgcatttaacttgaatttttttatgaatcttaccaaaaaaaatggaactgttatgaatttttttttgaaagatttctgtaagatcctaatttctaatcacaaaaatataaagctgtgatgaaaatttattactaatatattttggtgattatgttactagtgttggactgttggtaatgttatataaatggtgaattgttgaaacttgaaactgttattgatagcacctatgagcaaaaaaatggtgaatttctcatattggtcaggattagcaaagagagaattctaaagaatttggagaaaatcagattaggcacaaacatgatggtcattcttcaagtccattaagctggaaataataacgttcaatttgtgtttctctccttgtttcttgtgattgtgaatccattatacaagagttcagtctcccttagatccatctatgtctttgtgtcttagattgtagatactcatgcaactatattttctccatctgaaattggttggatcatacaaaggatattatgtggtgagttgtgtaaatttgtattatactattcataaaatcatccaaagaaacgaaatctttaacttgtttttaaaacgattacgactttgtaatgctctttactcaaaggttggtcatgaagctccaaacattcgagaagacgagattggtatgacatttgaaaataattaatgatttgcttcatgttgtgaattgaaatctatgatgtcatgttgtgaatgaaatctacaatctcatactgtaaacaggaatctcctatctcttgttgtcaatcagaatctacgatctcatgacgagaattagaatctactatctcatgtttagagccggactgataattttgaacgtttacgtaaagaaaaaaaccatgctctttatatttttctcgcaaatttactaataatataatataaaaaaaatcatactaaaacttgataaaacaacttttaaatccataaatagtttgtaagaaaataaaaacaatagtcaattttttttttttgttttcaattatttttcttcaaagcaacttcttccattttgtcactaaaatcacttaccttaataccaatggaatccaagccaacataaaaataaataacaatggaatcaatcgaaattaaaattttgtgcaaacgtctttttgaatatagttttatattcatacaaaaagaagaagaaaaaatttgttttcgtttttttttttctaaccaaaattttactaaaaattcattaccaatccgcttaattagtatttattaactttaaagcttaaaactcatgtgatatggtaaaaaaaagaccaacaaaaaatgaattaataacaaatacctataatattttgtatttttactcatctcttttgatgatcttagccattgtttgggtagcttgagttgtggaccgggcatgctcatgttgtgaattggaatatcaaatatgctatcccatgttgtttaatgttagcaacttgttggaatatcaactcgagatgacatgtgacttctcatcacattttggctttttttttatactgtttttactttgtttctaaaactggatttgggtatattgatgttctgaattagatggattattttcttagagttatggacattgttgcctttacagtttacagtatttccaatgcataacctaccacctagggctgcttaatctagtagtccattagaagatctctaaatggacagattcgatccaatacagtagcatccaacagaaaagaaaagacccacccaatctggtttggttacgtcagctcaaaacaactgaaaattacaatttaacaatcatattgcaacgagcccaaaaaaataatcatttacattatttcttttttctgttcacatttttatcacatgtttacagaattataaaattctcatgtcccggatttaatttgatctcattgacatgttggaaattgtgatcccagcattgtacatgctacttccatcaatttacctgcaatataatataaatcatacaaattattaattttttcaaacggtttggtttttgttttattaacaataacaacgaaggactattaaaatgattgtttctaactaatgcaaaaataatatatttagaaataaataaagaaaattttctctctttattacaatatgattatatgactcatacttggctttagaacaaaaaacaaagaaaaaggaacactttgtgattttcattcactttaacatgggatactttcgtcggtggatcattaagtagttataaatcctaattatctccaaaattttgtataatattgttgaaattttatatattatatcaaagtttgttagagagactttgtctccattctcacacgtttgtactttttccaaatctcacttgtttacttagtactctctcgttgaaagactaattgtatatggactaatcaccattatctttctataacaatgatttagttatccatttaatatgacaaaatcatagaacataaaaaattccctaagcgagtgactttataactttgtaatggtgtctataccaaaacttttgtatttttgtagtagtggtatgtatttttttaatttctataatttggggttaaaatgtcacgatcaaataggtaaggacaaaaattaatagactaaagattgatcaaaatttgattacctcttcttggtttaggtgctttcttgacaactggaacgccggttttcttctcgaccggagttttttcctccgggaacaaaacaccgtcaatcccttgaaccgaaatccgtccatcggtataaatatcaggatcgaacaaataagccgaaccatcaccatgaccgaacttaaccgaaccatctgcctcctgagcctctactttatgaggaaaccggagtgaatcgtaccggattttcccaaaccggcgtacagaattgtacatactctcttcggtttggtattccggtatgatgtgataatacataatttgctctggagctcccggttcgctcaattggtccgtggtcaatttagccatagcttcgtcgtttggtgctaaaacggttaaaacgtaaccttccgacacgagccgacccatctcggtggctaaagaagtgagattaacgagaatatctgccatttcattgtagccaccgtaatgaagaagcgtgtggataaaatctttaacttgagcctctccgttgaaatggtggcgtggcccacccggtcctggtgccggagccggagctagtgacggaccaggtgacattgcgtcgtaaaccggaagaaccggtggagctccggcgggaattggtgctggctttttcttgagacggtgagttcttggatcaacctccggtgctccttccggtaatacggcagcgattgaacggagactacgacggcggttgaaatcttcttgaacagaacgtgggattaaaagacgttcgattccgtggatgattccatcgggacgagttaaatcatcgggtttggttatttcagcggagttgacttttccgttggtgaaatggaggtggtcgttggagagagtacggtggctaacgacggcggaggagaattgtggagaagtgattcttttgggaagaatgtgaaacattaataaagattgtaatgatttgaggtttttcggttggagtaagaaagatttgaattc

SEQ ID NO: 499 - DNA, 90736 bp, Arabidopsis thaliana
gaattccagtttcaaatgccaatttcaatttagtccctacaccatccgtaccagctacaagataactatcacctgctcacacacactcattcattagaagaccaaaagtttcaacattcaggtgaaaattttgcagttttccatatatatatatatacctaatggaaagagaccaccaaatccaccaattccaggagccatctttgcgattcgtttaacaagctcagcaccagcatcgatatcaacaccagaatctttgtaattgagactatcagtgtcatcatctttatcagtgcgaccatctttcttcgacatggataatacacgagtccttgttctcgtcgtctgagcaaagctgacggagaaaggtttcggagatgacacagaagagaaccgggatcgattgacagcgtaaagagacgaataacaggaagaagaagactgcaaaatccgagcttccatggcttcaacagtagcagcaaattcacaacaagagtagtaaagtagtaattaacaaaaaggctaaaacttgtcaacaataacgggcggaggctgaagactgaagagagaaagcttagttaggacttacgggagacagaatgagactgagaatagcgacgccggaaaagggagggacttgagtagtttacttagctttttgagtctgctgcagcagaaaacaaatataaatacttttaaaaccctaataaacctaaacaaggtttacttgtttttttgttttttttcctcaacaaaaagatttaggattagatatcataaaattattttaaataaatttgggaaatgataattctttggaatgtatacagtcctcagattaacaatgcttttttaatgacactaatatttgagaatttttatgaaagtttttgagtttgtgttaacggcttaattgtagttgacatcttatatcaataatctttacttccaatcggatttctcaaacacgacaaacgaaaaacttaagaaacaaagttgcaacatttaaaaccatacatgaaaaaagaaacacacatatatatgtagagatactaattcacaagctggattttaacgaaagccttatcaatctttcccttcttcttcttcacttgttccatccttcacattcctgaaccacaaccaaaaccaatggattagattatttttcagttctatccgacttgtaaggtaagagccatgacgctccaagttacctccaagacgatgttaggttccgagttttcctgtctagctgaagattttcaagtgctgttgaggctctcatgacttcttccggcatatcttcagtgtcatatctccaattgctctcgtcttttctgtaccctgaggtagcggctcccgatgcttgagatgcagaaaccgacctgcccattaattaagcatgtcagactcataagcaacatggaagattaaagatcgttgatttggtagaacatggagttggatttaccgtcgttgatgaggtaagctatcagaagcagatgatctgcgaggaggatttctggtgtcaaggcttaatgacgactcggtttctgactctctccttgaactaccacccatgacctgcgtcatgttctgaagaaaaatgttgatcactaaatatgaggtgaatacagcagacaaattataatggttttactacaagaggatggaaacataatccctgggtgtgacaagaattgtaggcttggaattcaccgaacttattcaaagctctgaaaaattcttttcttgagtaagacactttatttacttggaaaaaatgtgaggtcgtgagcacaatgtaacaagatttgaactaatttggtaattgtaaagcttcgatgtaaccaacaggtattggtcatcttcacttagagaatagaggaactgtaaacattaacgccctgaaatcatgtaccatagctggactattgtaatgtgtaacaaatatggttgtaaagcttgtaaacagagaaaaaaaaaaaagctatactgtatgtgtaaacatcttcagagagaaagcagaagaaatacctcgaacttcaagaatccttcaagaacatccagaagaagcggtctactatcttcatttctgttgagctcataaccattgttgatactaaagtcacgtatctcagacttccaagaatcttttgcctttgcataggttttcagggatcacagcatcagttagaaagttcatcttcaacgtacttaaaagaaatatcagaagttcaaagaaaatgaaatatattgattaccgaattgcattctggttgataaactttaagcgtgtgatttaattgcgcccagtccaaatattcacaaatcaatgcagatagcaacctgcctgcattttaacattttataaagtgatcaagatgacctactcaactacacaaaatctcaatgttcatatcgcctaagaatagaagcaagcaaagtttcacccgaaaaaaacaaggagacacatttcgaacaagcgaatatatctaagtatcaagaaagcatttccaaaccaagacatgccatttagaaccataccattcaaagagaaaaggtctctgaagggtaaaagtgaagagaagatatgaaggataaaaattgagaaagacctgaaggagaagcatgaagctgccttgcacgatcattgcagcttcccaacaaagctggaggcagtccttcattgttctctatcactctatcctcttcttcgattgcctcaaacacacttgcacggagttcagcctacagaaacaactaaaatttcagcagaagaatatagagaaaaaaaaacaaatcttcaatctccaaaccaaatgttaaagaatccaattcagctgagaaggtacaattttttcacagactcaatttcaaagtacgacaaaaactgggaattcacatgattccagatgcataaagtagatctggaagcacgaaccctagaaaagcaatgtatgttttctcttcttctctgtactcaaatctctctacggaatttgaatgaagtatgtcacagaaccagaggaatcgtggcaagagaaaaacaaatatacccggatcttagcgagaacacctttcttctctagggttcgagtgactaaggtcttgagatccatcatctctcttgtataatcgtccattgttcttaccgccaatttgacggatcagatcaaaataacagattccctactaatgcaatcggattatttggtcaccggagaattctacaatgccgttctgagagaagcttttgcgtcatccagagttggcttcttcgatactttagtttaaagttttaaacgaagaagcgagagagagagagaagactaaagggaaaacaaaaaaaaagtacgagtaaaacaaacagtgaacacatcattcaaaaaccttgtttattactagagacataataattttggagacactaaaataagaagcaagtgaatgaaaatattcaaccacattgtgctttctttgattcttctttctgaactcttctcttcccataacaaatctcaaaagaaaacattttactgtttcatgttttttgttctcaaggagacagaggttcgtgcgttaaaaaaaaggctaattgaaaacgcagttgcaaataaaggagaaacatacatatatcacgtacacaaaccattactctactaatccagaagctgaaatgtttatccaaagcctaaatcaatctctcccttcttcttcatttgttccatccctcacattcctacaacacaagcaagcccgatggatcagatttaccacaacttgctttgttttcatttcaatgtgggattcaatgagacttccttgaaagcttacctccaagacgatgttaagttccgagttttcctatcaagctgtagattttccagcgccgctgaagctcttgttacctcttcatgtgtatcttggttaccttgtctccagttgaattcatcttttctgtacccagatgtagacaacccggctcttctatctgtaacatcttgtcatatttatttggtatcaaaaaataatgaagcatacgtatttcaaccaatacttcaagaaactagggaaatgatgactcacccgatgcttgagatgcagaaaccggcctgcccatttatttgaaggtaaataaagcaatcatgtcgaagagtaacgatctttgatttggcataataataagaagttgaagatatgtgtaccttcgttgaggaggtaagctatcagaagcagatgatctgcgaggaggatttctggactcaaggcttgatgacgactctgtttctgaatctctccttgaactactacccatgccctgcgtcatgctctgaagaaaaaattcattacaaaaaaaagttgatcactacatctgaggagcatacggcaaaaacagatgataatggttttaactatgataggatggaaacatgattcttagatgtgaagagaacttgaggctaggaaatttgctaaacgtgtttttcaaatctctgaagaactctaatctctactaagagactttatttttcttggaaaactgaattttactatctataacttcttctcttggttgcgaggacagagtaccaagattttatgtaagttggtgtttgtaaagcttgggtgtaaagtattgatcatcttcacttacataataggaactgttaacactacaactcataaatcacacatactacaggtggactattgtaatttgtttagagtatggttgtaaagattgtaaactaagagaagaagttatagatagtaaagttctgtttcacacttggctgcaaacatcttcaggggaaaaaaagaaagaaatacctcaaacttcaagaacccttcaagaacatcgagaaggagtggtccactatctccatttctattgagctcaaaaccattgttgctattaaagtcgcgtaactcagacttccacgaatcttttggctttgaataggttttgcaggagttcaccagattagtgagaaaaattcatcaacaatcttcttaatgaaacatagcaaaagaaaacgggattatattgattaccaaattgctttcaggttgataaactatgagcgtgtgattaagttgtgcccagtccaagtattcacaaatcaacgcagatagtaaccttcctgcatttcaacaaaaatttcaaaccaagagatgccatttagaaccaaaccattcatagaggaaagatttaaaaggataaaagcaaaaacttgtgaagaaaaaacctgaaggagaagcatgaagcttccttgcacgatcattacagcttcccaacagagctggaggcggtccttcattgttctctatcactctatcctcttcttcaattgcttcaaacacacttgcacggagctcagcctacaaacacaaataaactatcagcaagattccagatgcataggcaattaacaatatcgagcatttcgatctgaatagcaggaaccctagaaaaagagtaatgtatgtatttcaaacgaatcacttctctgttctcatttccactcaaaaatttctgcgaataatgtatggtagagaagtagagggaatttacccggatcttagcgaggacacctttcttctctagggttcgagtgaccaaagtcttgagatccatcatctctcttgtataatcgtccatcacaaaatcaaatcaaagtaaggaaaattagggtttctgggtgtaaaattggatttggcaaaattggggtttttggccgtcgggagagaaagacgttgaaagatgataaaacgaaaacagtaaaagaaaaataaaaacaacacttttgccaaatcatccccttaaagattgatagtttccactctcgtccgaaattttaaattttgatcttttgccccctatgattgtgaaatgtttcttaaatgttttgtcttatcttccttttttgaacgagaatatgatgtcaagttcacattttgagatgtaactcagagatcacaacacatttgcattcatggacagaaaaatcatgaagttcggtccaatattgccaagcatatgatatgaaatgtgtatgaatcatattagttgtttgagcattttctagtgatgactgactattatttgatatagaatctcagaaaacgaatgaacaaataagcattagattttccactcgcaagttgggtcagatcaagggcaatcgctccttcttagattataatattggatggaaaggcctaaccttgcttgtcgttggagttgtatgaaactttggtaactttagtgttactctaatggatcagtatcatctagttgtacaatattgacatactacacttactaattaaaaaaaaaaccaaattaattagttacattcaagcaaaatgggaaagaaaaagctaatgaggatacgtgtttacgaatgagcatttgagtatccaacgctttgggtttgtcaatgggatgaatcggaatagaagaaggcccaagaaagaagaaagtccaagctcgactcttgtgttaattattaaatactatgtattgcttgtgatcttataacttaaagtagagagagtacttggaactacttttctttcttcttgtaactgtgtattgcttgtggtcttttaacttaaagtgtagtcgattcttcttataagaaagaagccaagaaacttatttatagagtttgaaccaaagaatatgatcaaaaacgtatataaatccgatttcttcagttgtttcttgtttccattctcagttttattcacctacttctgttctgcttctttttattaccattttagtccaacggttatgtagcttagtgttttccattttgatgtcacatactcaccctcgcaagtctcacttccctatatagctaaaagaaaagaatcagaactagttcaggacttaggagcacatggttttttggagagggtattctcgtcattttaagcattggcttttgggggaaacgaggaggggaagctaccacgtcgcccaaaactgttcccacatatatgcgtcaaacattaaaccgaaaacgttaaaacaattttttttctttatatagagatttgacaacaaataataaaataaaaatgcccaccaattatcaaagaatatggttgaatcttcaattattcaattttataacgtgcttcatgcgtttccactcgtttctctatcaccccttttatagatctactctaccaacaagccccatatttattaatcttagcaatcgcttctcaatctccctcacatacaaagtccataattttctggccggaggctaatcttagataatatttgtgtttgacctactaacgtatatcatattttccccaaatgtatcatggtgtagttcctaggtctcgaattcggatccaacagaacccttctaatcgattgaacataaccaactatgaactatatatatttaggttaaattaaaattctatcatgaatttactatatatgtgatggaaaaaaagattcgggatgaatgagaaactggttttgaagctagaatagtttttaaaacactttaaaatcatgtgtttatcagatgtggtttcataacactatgttcctactaaatacaaacatcctaattcgttttttaagccaacaatatgagttttattcatattttaagtcacaatcctagcttaatataagacttcaacaaaaaatttagcaaaaaatttgggtccgagttgcaacctacaaatagattgtgttgtttaggtgtagaaaatagagactataaacataagtgcataaagcacaaggttaacaaagaaattgacccatcactagtaatattctgataaaaatttcaaagcagttaaatatcagagatttttgcatatagtacacgttcaagtattttaaccatttcaagaaatttgagtggtagacaatatttcaattttcgattgagtaataaactttgaagtgtgtagatgacttcaaaacacattatcattgtgaattatagggtaatacgttattgtgcaatgcaagttattaataatgtaagaaaaaaggttactcttttacctattggaactagaatgaacagagatatttagtcttaccaaataaggaaaggccgattccttaaaatctaatattttcttgcatatctggataaattgaacggctgggatttgagaaccaacttatcatcaaatctatcataattatttgtaaaaagagagatatagatttggagtgagtgattggtgagtggttgaataatatgacaattgacataaccccactgtccctctgtctccattaaggtttctctctcttcctactctcaatacaatagtagtagttggcatattggacccatcctttttttttggtttaggccccaaacgtgtaaacatcacaccatctctcttattctttattcattgactataacacatttatcattttattgtatagtttatgttgtggtctagattatcatctttcttgttcctccaataatttggaattgaagatccatcccactagtgataaagaagaagaaaaaaaaggcttgaggatgaatgtgttaaagaaggatagttaaaatattttaaatggtttatttaaatttatgacagtccatttgaaactccttttcttcaccaatatttcagtataaagatgaaatgcaaatggtatctccttcttatagattaaaccataacctaaatcaactcttacgaaatctcagttgattgtgatttatgtatattgggatgcgaaagcacaacaactaggtttaatttcttctaaaatgtgtgataaataaaatataatataaaactaacaaaaaaaatctgtcggtctctctaatttttcgttgctatgttttatccatatatcgtaatctttaatttaaatggaaaagggttgtcctttggcaaaataaagaaaagaaaaagaaaaaaagatagagaaaggattgtcctgattcgttaaatgacgcatagagaaacaaaatcacatgtgggtttatttaacacgttgagaagataccattgcgacgcgaagtaccaaaaaatccctgaccgttagattttttttcatatcttgacacgttggaatcacacgagggacctatcaataattgttgtcgctaaatgccaaatttaatgaattttatcgaaaaataatgacctaattttattactaaaatgcagagagtagacgatgttaaccggttaattttgttgttgaatgctttaaaatgtgaaataactatgttgaattgtgtttcatattttcttttttaatcgtataatttactaacatgttagaagaaattacaaattcagatataatataaaaatttatttatccttaccaaaaaaaataaaaaaattatttattggattttacccatctactattcattctcatcattaacttacgttttccgaaaatcaaagatatttaggtcattttatgtaaggaaggataaaaataagtaatgattaagaaataacatttaaaataaaaaaaaattgacaacaacggctcattattcctcaaaattctaaattttgctgagaaattgtgttaccaataacaaacataatcgcatcgataatcgctatataatctgttgctaattaaggataaattgaaaatttgtaaaagtcggcaaattcctaatattgctagatttaggttgttgaaaatttcagatattgactttttagtacttttataattgatggggctatcttattttcaattatattttgtttgtggtcacactaggcctaataacgtacacttgtcaattaagaacaaatttataatcttacagacaattccacattcgagcatgcattaacaaatttcttcggcattaaactatatcaaattagaatgctttggtttgaaaaataaaagtaataacgcttgttttttgatataatgcatagaaattaaaaactacttactcttcaaccaatcacaatataatacgtcctttaaggtttgacttttggttttgatcttaatactaaaacaacattaaaaaaaaattcttaaactctttatgatgttatctattttgttaaacttgtcgatgacttgatcaaaagatgtatcattagataaatcaagtagctgtattttacgagggaaaaataatctatcatattatattcacgaggtctctttaccaagtagaaggctaaagaacataagtaatagtataagctagtatctttatactttactctcctcacctatttgatggcattagttttgtttactattttaaaattacaggtcgacttcacttaaaaggaagagaaaacttttgtttttgttattacatcgtattaacgcggttgagtttacaacatcaaaagtgttaatatataaaaactcatcgtacaaccctatctacggctctcccatatttaattaacaaaaatgaaaactaatatatagtacaaaatatgtttattcgatacatcggcaaggcaagtacaatcatataattatagaaatcaattttatatataaaaaaaaagagttgaaaaggcaaataaagggcaagtgtatccaatgcaaccttcacagtgaacacgtcccacgttcttttttttcttccctcttttagaactctctctctctctcgtttttgacacttatcctctctcttttttctctctccctctctctctcgccggaaaaaagaacaacgtcgtttatagctaaagattcgatcatgttggatcttaacctaaagatcttttcttcttataacgaagatcaagatcggaaagtaccattaatgatctcaaccaccggtgaagaagaatctaactcatcttcctcctccacaacagactctgcagcgagagatgctttcatcgcttttggaattctcaaacgcgacgatgaccttgttcctcctcctcctcctcctcctcataaagaaacaggagatctctttccggtggtggctgatgctcgtcggaatatagaattctccgtggaagacagtcactggttgaatctttcttctttacaaagaaatacacagaaaatggtgaagaagagcagaagaggaccaaggtctcgtagctcccaatatcgtggcgtcactttttaccgtcgcaccggtcgttgggaatctcatatttggtaaatcaaattatatttcatttttaatattatcattgcatttttatattgttatttgttgaattattgctatatttatctctaattttgggtttggaattgattaatttgtagggattgtggaaagcaagtttatttgggtaagtagatcagatttttatttaattattgggtcatctttaattacgtgtgtgtctatttttaggcataaacgatgaattttaaaacaatcgtatttttgtgataattttgatttgtagatcttctctgacaacgtctgttaaaaaagtttattttttgtcaactacctctattcttttttttttaaaggatgtatgttttttttttgtaaaaagacaaaaaaacataatagactattacagctcatttacctatgtttgttacttctgtctttcacgtttaagtgaacacaagttgattatttgtattaatctaactttttttccttgacttaattttcgttttaacaggcgggtttgatactgcttacgcagcagcaaggtaaaatatatatatatatacacattatttgttacaacattcgtcatttgaatatgttttaattttgtcaacatatacacattagagtttgttgaagacaataaataattaatatcaatttgacttattcataaatgaataccagggcttacgaccgagctgctatcaaattccgtggtctcgatgcagacatcaatttcgtcgtggatgattataggcatgacatcgataaggttaaacatatatatatatatatatatatatatatatatatatatatatatattacgttatgaagatgattcatttccctgtatagttcgaaataatacatgtggatctttaaaattatcaatttatgtatagatgaagaatttaaataaggtggagttcgtgcaaacacttaggcgagagagtgcgagtttcggaagaggaagttccaaatacaaaggcttggctcttcaaaaatgcacccaattcaaaactcatgatcagattcatctcttccaaaacaggtaccattttgttagacacgtaatcttttgacaagtttaaagtgcaaatagttagtcttattagtatgaataaaatatggttgaaatattccctactttttgatgaaatggcctaattttactatttacacaatctacatcatggaaaatacatttcacttggcggatcatggatgacaatattataaatccgtcacttatcttaactatatttcacctatattcaatttatttttattctatctattcatctagctagtgctttaccattcaaagcctaaccttcactttttggaaaagttattgtcgtcttacacaattttaaagtttgctgaaaaaaagttataaactagctagctaattaataatatttatttttatatactactaaaagaaagaataacttttatccagttcaatcatatatacatcaattagtccatatatatacaattaatcaaaactaagtagtaaaaaaaaaaaaaaaacttcgtgaaggtacaaaattttctactcaaatttaattttctaagtgaatggcaattttcaaatacttttacttatatatccccctcaaactataccaagccaacgttacgtttgtttccatttaggtgcaagcttgaaaccatcgtccgtttcaagagtttgatactgtcggggatgatggtttcttaagtttaccttttatgtttcgttgtaaatgcttcacagaataccattgttaaaaaaaaaaaatgaaacaagagttagtgttatgctgtgaataaacttagaaatgtttatacgtatgtgcaaaattcgtaggggatgggatgcagcagcaataaaatacaatgagttgggaaagggagaaggagccatgaagtttggtgcccatatcaaaggtaattgattaatatggtgtgactcagaatgtaactaagtttattataaggcatggttgataaatttaagtgaacattgccaatctatatataacactaaccacaaattttacatatactttaaatctgatcaaggaagctagctaaccttttcataaaatttttagcactctccatttgagcaacttatccattaacattgtcatttttataggaaatggtcacaatgatcttgaactaagtctcggaatttcatcatcatcggaaagtataaagttgacaacaggcgattactataagggtatcaatcggtccacgatgggtttatacggtaagcaatcatcgatatttttacccatggcaaccatgaaacctctgaagacagttgcagcatcatcaggattcccttttatcagcatgacaagttcctcttcctccatgtccaattgttttgatccataggatcgttctacactctcttaactaatatatatttttactctatctgattattgtatacaaggataaaatttgattctttccttaatgagtgagaaatattggaagtgtttgttctaacttcaactcgaattatataccaaacgtggttatcatcacgaagaatttgcacataaaaaagctaaaagcacatcaccaccagtgggcagtagcaactaagagtcttagaccaagctataaactgattaacccaaaaccatcatttatgagcaaagttgatctcagaagcaggcaaaagacagacaaataaaaagataatccgaatcttgtaacttaacggttccgataactataacctcgcaggctaaccggtggatattattctctgtgtcagttgcaggttcctttctgggttttgaatctggcagatttcaaaagggctttgtgttttcctgttccagttcacatggagtagccttactcgagcagacgatatgctagaagaatcatatgaagagtttaataaggactcagtgcactggtttcatcacccaccaacatagatgcctcagaagaccttgaaaaactggaacctggtttcagttgggaaataaagaagctcagtataagaatacagagtcaaattattctggtttgaattcgttctatgttttataaaattgacaaaaacagaaggcccttcttagtttctttacagaaagtctatagagtctccctctttcatgaataacaacatttatactacaaccgtgcaaaatgaaaagtgcacaccttaagcagtcatattatcggggtctcacgaaaagccaaagctaagtcatcagtcaataatgtggtctggttttggcagactacaaacttgctgcacgtacaggttggaggtttccgacttgcccactaactagaatatcaaatgtagcaccatcgggtaaaatacccttgtcaagcatctcatcgtgaagtctaaaagcctcatcgagatttccttctctataatgtccggcaatcaccgcgttgtagataaggacattcggagtgacattattcttcttcatctcctcaaacatcttaaccacttttacaaactgccccttcttgctaagaccgtttacaattactgtgtaaatgatttcatcagggacaagacccaccgcctgcatttctgtgtacaactcagaggccaggatcaaatttccatctttcaacaatccatcaatcagtgttgtatatgtacccagatcacatcgtagaccgtctttcaacattttcttgtacaaatcaagggctgctaccatgtttcccagattacgaaatccagaaatcaagctgttgtatataggttggcttggattcaatccttcttcaaggagttcagagaacagagcagatgcgctttccatgttactccttttgcagaacccatcgataagagcaccataggctggaatatcgagtttgacacctttgttcttcatttcgtctctcatttccaatgcttgatccattctgttatttttgcataacccattcatcaagctggtataagttatgacgtttggagaaataccattgccacacatctcttcgtatgctgcaaccgcagaatccatttcaccctctttgaaaaatccatctataatgctattgtaactcatgcaactaacacataaccgtttttcttcgatcatatttgccaacaattctcttgctttggatgtctgaccaactttgcataaaccattgataattgtttggtatacaaccccgttgacttcaatattggaagaagtcatatgattgacgacttccaaagcgttttgttcatcatgattcctgaaacatccatcaatcagaatggaatacgtgtagttattcggctttagacccttttccagtatatttgaaaaaacaatacgagccaagtccatgtttttctgtctgcagtggccaagcatcacgttattgtaagaaactacattcggtccaatacctctactttccatcttgcttaataactctgtagcttcgtctgtcttaccttgcttgcataaccaggataatatagtgttacatacaaacacgtttgcaagaccggtttcaaaagactcgtcaaagagtttcagtgcctcttcatgtttctgacctttcaaccacccttgaattatcgtgtggacatgaaagacagaaggagtaagacctaagacttccattttcttgtaaaattcaagcgccttttccatttccccgttcttacgaaaccattctatcagaaccgaaaaagtaacgctgttcggagaggggccttccttttccatcttatcaaacaaaaccaaagcactaaccaagtcattgttcttgcagtgtcccgtgatcagactcgtcgcagcaactacattcatcgatatcccatcactcaacatctcatccttcaatctaattgcatcatccatattaccttgcttcacagaagccaaaatcacagaagtataagtttcctgcgacgggacacacaacttcttctccttcatctctctcaataaactattagccatagccaaatcaagcgtcttgcaacaagcctgaacagcaagactatacagtaaactatccggttctgctcctctctcaatagctctacttaaaacctccaaagcctccgcaggcttttcttctctcaaactagctctcattaacaattgcgttgttacattatcaccatcaacaccaatggcaaccatcctactgtagagttccttagcttcagttaacgaattcctttgaactaaagcactcaaggtcctattcacatatggaaaaaatggaatcacatctagttccaacatctggttgacgatatccaccgcatgatccgtttgcctatctttagaataagcattcaataagtaattaaaagctcgtgaattgacttcaaacccaaatgatttcgccgaatccaccaatttactgaccaaaacacttgccattggagttggattgctcgtagaaacgtaccgtatgagcaaatcacttgcacgtccataggtctcaggagaactgaccagaatatgaatgagtacccagaagacgtcaccatcttcaaaacttccacgccatggtctagcccaattatagaaacgaagagcagcttctgggttgttcctgcgattgagaagaacatcgattacagatgcatcgtccttctgttcaggcttcgcagacaaaagactcactttggaggtaactgggttttcttcagaagtggatccgtaaactagtagtctctgctcttgacttggattctcagattctttgggaaactgagactgtgaacaaaagggtttattgtttctcaagttacgaagacgaatccgtgaagggatttttctaaaaaccaataaagatctcatctttcgaggttcttctctcaactatcttcagcagagaaaagatgatcggagaaataaataaaagagacaacttgaaatcccgaagatacaccaaaaaaaaaaaaaaagaagcttaaaccctaattatgtctattaaacggcgtcgttttggggattattcctttttaaaaacgttctcttttcccgttttatctaatttcctcaaggaagagagaagcaaaaatgtcgaattgcagatttctctaccacaacggtgtcgttttggaggctcctccggtcactaccttccttgaatcgcacacgggtatgcaatcaaaactaaatagactgcaaaagtttgaaactttttgattaataagttttgagaaatctatctacaggtgcttatacaacgacgagaacgataaacaatggtactagtttcttgttctgggagagacacatgaagagactttctagctcgattcgtattcttttgaagtcaaatcccgagcttttgttcagttctgggtcatcaccgcggttttggatgaatcaaccagttcctggttcgagtatttacgatcgagtcaatggctctatgagcgaggccctgaagtctgttgttgtcaaggaaagtgaaagactctatggagaagaattagcagtaactgttcttgttactggtaatgtggagaaattgaataggttagatgttgggaacaattgggattttctagatgtgtggttgcatataggtgcatactcgcctttaggcccgttaggtgttggagaaaatgccgcgagtttggctttggttggtcgtggacgagatgtagctgctgctaaatactcagactgggttaggtattgtgcttgttgtgctcatttagctgattcttgaggatactgatagctcaatttttcagggatttagcttgtggattacttgagttttgttgtttctttcttaatctcggtatggtttatgatttaggcaggcttaggaagcctctggagaagtttagacctcctttgaccactgaacttcttttgtcaaacgatggtgatcatttgcttgagggctgcatcacaaactttttcgtagtttgccgcagggtactaacaaaaatttgatttttttttgttcaagcacaagtcacctatgttgtgattaggatgtttattgtcttcatttatgttgcattttagaagtttgaatttcattttaccactgcatgatttactgtttgatctcattttaggtgaagtcatcagagaatctctacggcgggagtttgagcgagtttgaggtgcagaccgcgcctataactgatggtgtgctagcaggagttataagagaccttgtcatcgagtaatatgttagaccattaagaatgttgattatattcgtctgtgtttatggcctgatcaaccaataagatttgcttttctgtcagagtgtgtttaagcgaggggattccataccgcgagagagcaccttcgtggtctgagcgtgagctttgggaagaagccttcattacaagtagatctttccatatccataatctgttttttcatcttctcgcatatatattggcctgaacactttcaatgtgttgtgtgatgtttgtatattttaacatcccaagaactcactgggttcaggtagtctgaggattttgcagcatgtagggacgatcaaagtacccgttggttcaatggagggattggcttgtaacaaacctgaggagattcaatggaaggagaaaaggtttaaggaaagacctgggatgatcactgaattaatcaaggtaaagcttgttacttttattacccttagaatcattggttttgttcttgtcttttgagtcaaatcaaagatagaaatcactttaaagtttttgtttgtcactgttatgttggagtagaaagcgataatggagagaggtattaaagaagggttcccgttgaaggccttttagtgctcttcatgattttgccaaatagctgaaatgttgattcgtctatggtttgtaattgtattgacgccaatatcttcccaaatcatcactcattataattttaacgatctgatgtttaaaaggttctcagttatatatatctgtataattgatcagtagaacatattatttaacggattttatggagatactccggtaacttattaaacagatctcatgaaagtaatcagtgtcaagaaatgtcaagactgtatacatatgttaatatgctaaaccacaacgactatcacttcccaaaacatggttatgatgttgatatgaccctccaaatccacaagtgtgtatgtgtatcaacgtcaaagtattgaatataaagagttgtgagtactaaaaataaaagcaaactaaaaatatagtccgtatggaatgcctttaaaactgcttgtagtggaggaaaatagaaatttggaggacaccaaattttccccctttttttttcttttttttttctagtaaatcaaattaattaatatcataaaaaagattagatgatatataagcatcttttttttttccgtaaatcaaattaattgatattataaaaaagataatggggtgattgacatcgcattgtcaagactttaaaactatttaacaaatgataaatcacattaattgacaccatgtatgttttggatatgtttgataaaaatagtttactagtgaaaaaaaaaatatgatccacacccgagggagtagatttaatttttttttttcttcagaaaatcagctatacattaattatgtattctgacttaataattggtcgggtttgcaaatcttttatttttttggtaaacatgtgaagaaaaaaatagaaggtttgtaaatctttcaatattgtttgtacattttccataaatctttcaatattgtttgtgcttcatcaacatatagtcaacacaaacaatgctacgctcttatgaggttctgcaatatgagtagcttggacgaggtttctgatcaatagatctgttataatattataaaacatatcgattctaacagattttcaatggatatataatccgataactttttagacacatctgatgagtgatcactgtaaaaaaaaatacaaaaaaatcaaaaccatgtgtatatatgctaaactacaaatataaaattaccacacttgtacaatatataataaaaataaacatcataatactaataattacgacactattggtcttggtttggtttatatgcacgactccggctttaaacaataaatccaggagcatgacacttccacgtccttggctagatctaagtttaagtcaacgatgactcatagtggacacgtgtcactcgttcattcgagttatccacgtgacttcttattacagtcttcttgactctttttttttttttttttttttgctgaaaattataaaaacccaaaatccaacaaactttgattacacacacttacatacaacaatggcttcgtcatctacaagtatctctctccttctcttcgtctctttcattcttcttctcgttaactcgcgtgcagagaatgcgtccagtggatcggatctcgacgaagaattggctttcctcgccgcggaggaatccaaggaacaaagccacggcggcggttcgtaccacgaggaggagcacgatcatcagcaccgagacttcgagaattacgatgatctcgagcaaggaggcggcgagtttcatcacggcgatcacggttacgaggaggagccgttaccaccagtcgacgagaaagacgtggcggttctgaccaaggacaatttcaccgagttcgtcggcaacaatagcttcgcgatggtggagttttacgctccgtggtgcggcgcttgtcaggctttgactccggagtacgccgcggctgcgacggagttgaaaggccttgcggcgctcgcgaagatcgacgcgacggaggaaggggatttggctcagaagtacgagattcagggcttccccaccgttttcttgtttgtcgacggagaaatgcgcaagacctacgaaggtgaaagaacaaagtaagtgtacaatgtttctttctccaactgttaggattgagatatgaacatagctcatcaggtttagctttggatcttgagagattgtttgatttggaatccgagaagaattttttaggattattcaacctttatgaaatggtacaatagagagaggcatgtcacatgtgatctttgattttattctctctgctttggtttctcatctgttagttttccatacgaattattggtcaaaaagtacgtttcaccattactggtgtcctcattgcagggatggtattgtgacttggctgaagaagaaggccagtcctagcatccacaacatcactactaaagaggaggctgaacgtgttttgtccgctgaacctaaacttgtctttggttttctcaactcattagtggtatgcatcctttaaatccatggtgtttcttgcgttctttcttggatttagttctcctttttaacttctcagagctttaaacatattgtcaaccaagttggttactgtgggacttctctaccatagaatttcagaaaggataagaaatgaaactattatcgttacgcaaatgagtgcctctggtgtttagtatatcaaggatacgagtggtttcccttgcagtatatgtaaggttgctattaggtcttgtatatcagatcttcttgtctagtgtgttttactttgtgtggcaaagagttttaagatgttggattgacaagtgtgaaagattttgcttttaatatcttatttttgctaccattttctcttgctcaggggtcagagagtgaggagctcgcggctgcgtccagactggaagacgatctcagtttttaccaaactgcaagccctgatattgcaaagctatttgaaattgaaacccaagtcaagcgtcctgccttagttttactgaaaaaggaggaagagaaacttgcccgttttggtaagactcctcgaatacattaccttctttttttgtgctacttagatttcctctatgcctctctcatcaagcttctctttggcagatggaaacttcactaaaacggctatagcagagtttgtgtcagccaacaaagtcccattggtgatcaacttcacaagggaaggtgcatcactgattttcgagagctcagtgaaaaaccaagtaaaaaccatttgtctctttaaaatttccctttattttcttgctgctattaactaatgagatggaattttgtaaaacccttttcagctcattctttttgccaaggcaaatgaatcagagaagcaccttcccactctgagggaggtggcaaagtccttcaagggaaaggtaatttttatctttgaattttctttggtcatttttgctcactttctggaataattaaaaaccacctcgtacgattatttataagttgcgattgatatatatatatataccaaaaggagaggtggattataactttagttattgaataaaaagggcaatcttctcttttctctgcagtttgttttcgtttatgtgcaaatggacaatgaagattatggagaagcagtttctggattctttggtgttaccggcgctgcccccaaggtaaagtagttggtgtgaaatatctgtgtatcggttttgtttctgtgatgcacatgatacaacaaaccaaactgtgaaccagaagatctaagtttccaatctttccttgcgtatgcaggttcttgtatacactggtaatgaagatatgaggaagtttattctggacggtgaattgaccgtaaataacattaaggtaggcccaacattctattttctgtgaaattttatggtttcagggcgtgttgttggttatcttaacgcaatgactttgtttaaaaatagacacttgcggaagatttcctagcagacaaactgaagcctttctacaagtcagatccactaccggaaaatgtaaggcgtctgacatattttaaaacacatctaacatctgcacacaaaactaattctcttaaatgaaacgcagaacgatggtgatgttaaggtcattgtgggaaacaattttgatgagattgttcttgacgagtcaaaggatgttcttctcgaggtaataatcacttaaatttttgaatggaaaccggtagagccttgcttatacatcttagggttatatatacctaaagcctaagttttgtcatagatatatgctccttggtgtggccactgccaatcatttgagccgatttacaacaagcttggaaagtatttaaaaggcattgactcgttagttgtagcaaagatggatggtaccagcaatgagcatcctagagcaaaggtgattaagaaaaaagaattgcgaaagagcttttggtgattcaagacagagatctgattttggttttgtcttaatctctttttgttcaggctgatgggttcccaacaatcctgttcttccctggtggaaacaaaagcttcgatccggttagcaaatattgttcactatatcaaacagtgttttgaaaacctgcaaatatttttacttgagtactgaaattgttttaactgtctcttgtaaaccaaaaaaaaacagatcgctgtggatgttgaccgtacagtagtggaactgtacaaattcctgaagaagcacgcatcaatcccatttaaacttgagaaaccggcgacacctgaaccggtgatctcgaccatgaaatctgatgagaagatcgagggtgatagttccaaggatgagttgtgatgatcggaacagagtgtgtaacaaggctatagatgatgactcttctataaatgatagaaaatgttttgccctttgtttttttccattgttgtatgctatgaaatgaataattaaagaagttttggtttctcaagtttttggatgtaactggaggtttgatccacacattgagtgttgatttaatgcgacttgtggttcataacaactagcacaaaagatttcttacgaagcgtagagaaaccacacaatttctgccaaaaccattgttatcatagatcttatggtttacaaaaatatgcaccttcaaagttcatatagaatagacgtaaataaaaatccataagagatgtacgagtttcatatggaagagacactgtttattagtctagatccaacgtgttctctcgtactatggattagtagagaataattcgttctcttttaacgagatatggttgttatataagatatagaaattgaaaaaagcatggtaaacaattaaatccatgtttttctattatgtgtcactgcggtccataggctggtgaacacctaatagtgtagcattgtcaatatttttctttaccattggttttaaagcttccccaccaaaactcgtcatttttacaaaaaagttgcacaacatgtaggcatctgctttattacaagttcatggcggcactagtctgcttcgaaccccttaacattgcttacaatgaggcaaagtttctttttttcccccttgtttttcctaatatgacaaaattgatcaataaaaaagtagttacaattgttacaactttttattgcaacttttagttaaaatagttataatttttattgcaattaaaatagttacaatttttttattttggttatgtttttttatcgcatattttcgttaaactaccgcatagtttggtaaattttttgtaatgattcaaatatttaaatatataattataataatttagtacataaatactaggccagagcattcatttatattcggtttgcttctttcggttctaaactctgaagatccataagaaaccgaaaaagttatggttcaactcgattcggttctaattattttatccaaaatattttctaaaaggactgtatctaaatatcggaaactttttttgacaaaattataataaaccaaaatatcagaaaaattaacaaaaattaattagattagaggtaaaaaaaaaatgtattggacttagttttgtaaagggttgaccaaacatttttttgttctattcgggtatctaaaacagaaccagaatccttttttggtttggtttagtttggtttttcaatttcggtttttgttcctagctcaatatgcaaaatcaatattattttgtagtttaatatataaatacaaaaatttgtcgaaaatgagtttcagggtggagttcatatcctagttccacataatagtagagaacacgaaagaactttgacttatcaaactttacatcaacatataaatctaatatcatataatatactattaaaaattctataatttatttctagagtccatccacacacgtttctgatatttgttttttgtttgtaaaagaaaaaaggaaaaaagaaaagtactagacatctcttttccgtaaaatatatactaaaaatataaatattttattagcatttcattatcttacctgcatttcaactatggcaaaagaaaaaataacagatttgaaaagaaaaaaaaaaggaaaagcattcaacgttgatagtatgtaaactaattgatgctctaaattagcgttacatttgttatgtaaaataagaaagtcaaagaagcagagtaaagattaggtgatacttgcaaagttacctttcttttccaaatgtaagtaacgtctcaagtttatcaaactaatagtttatgctttacatattttcccaatctataaattttatttgtaaacagaaacaaatgccttcgaaactcttgtatggaaaaattaaatccaaaaagttagtatattattagagtaaacactcataacagaaagatctttttcatactccaatatggaaaattttagcatcaaaaataacatttttttgttgttgttgccaatatatcagcatttaaaaaaaaaataaccattcgcaagtatagaaataataaagtctcagtaaaagtgaatgcaactacaagtctctgggatggcaaaattgttagcaataattctgtgtttgtagtacataaaataaaattgattaattgctcgttcttcttttattaataatccgtgttttgttttgtcctttctcttcaatctgggtttggtggggaggttttaagtcaagcgtgcgatatatatatcatcaaaacagacatcctctgttcttgcctcttcttcttcttcttcttcttcatcttcttctatatattggtgtttcatttgttctgctttaaaagtacacaaagattcatcttttttcggtcctctgattgggcaaaagactagctcggtcgtgttttgaacaagagatacatgttttgaaaaattcctcgcaaaagaagagaaagaaagactcaaacttttgtttgaatttgataccattttttatatatataccaaaagtccaagactggtttcatttttgggtttggtctgaaacctctcttcgtgttgtttgttcatggtatgtcttaattagggtaaaaaaatacttgattgttttctctcaatcatcatgcatagagtacgcaataaaccggttaaatccaccgctactgcttccgtcaagcatttaatcaaacagagaggcggcgacggagctacggcggcttccaagtcggcgaatgattataataataatgatagtctcttgacggatatgcaggaaccaagcatcgatacagataaactcagctacgagattttctctattcttgagagcaaatttcttttcgggtacgacgactcgaaacccgaacccgcgaattcggttgttgctgggtcgattaagaaccagagaggtaaaatctgtattctgagtatcgatggaggtggaatgagagggatcttacccggtaaggctttggcttatctagaacacgctctgaaatctaaatcgggtgacccgaatgcccgaatcgccgattactttgacgtagccgccgggtccggtataggtgggatttacacagccatgttgttcgggtcaagagacggtaaccgccccatcttcaaagcagatgacacgtggcagttcttaacgagaaacgccaagggtctttacggaggagcaggaatcttgaaacgggtcttgagaaccgggtcgggttgttgttccgggacggctaagttaaagaaagtgatgaaagagtctttctcggagctaaccttaaaggacacgcttaaaccggtgcttataccttgctacgacctcaaaagctctggcccgtttctgttctcacgggccgatgcgcttgagacggacggctatgattttaggctctcggaggtttgtagagcgacttgggctgagccgggtgtgtttgagcccgtggagatgaagtcggttgatgggcagaccaagtgtgtggctgttggtggaggattagccatgagcaatcccacagcggctgcaatcacgcatgtcctgcacaacaagcaggagtttccgtttgtgcgaggtgttgaggatttgcttgtgttgtctcttggtatgggtcagttgcttgatgttagctatgagtatgatcggattatcaagtggaaggctaagcattgggctcgccccgcagctcttatttctaatgacggtgctgctgacactgtcgatcaagctgtggccatggcttttggtcactgccgcagtagtaactatgtccggattcaggtatgggccacactgcagaattgcatttgataacttcaaaaattatttttgattttcttgaatacctagtatttctttcgatttaatgaaatttgtgataggtaataatcttcgtgttatataagttcatttccaaatcctacttgttgtatatgagcttagtaggattgttggatgatataaagtatgcacttgtaggtttttcacaaataatagtaatatgtttgtgcaggcgaatgggtcgaacttaggaccttggagtcctaacatggacacagaccctagtgggagcaatgtgaatatgctgatgggagtagcagaggagatgcttaaacaaaagaatgttgaatctgttttgtttggaggtaaaagaatcgatgaacagagcaacttcgagaagcttgactggttagctggggaacttgttctcgagcatcaaaggagaaatagcagaatcgctccaaccgtagcgttcaagcaatccgtgcatagagcagatcaaaagacaagtgataaagatatcggtgtgaccgcaagagaacgatgaaataagaaatggtttgcttagatgatttttttaagataaggtttttatttctttcttcttaggttatgatttgttgtatagatttgtgtttttgagattgagtttctgagacatgatgagaaaaggggaaacacctatcatcttgcaaagagggctcaagctccttaatccatgctgcccaaaaaaaaaaaaaaaaatatgattcctgtaatttcggtttgtctttgttttcctatgtaatcatcatgatttcttctttgacatttccactagctcaagaaaagttattaatcagctttatgtaacccaaatgaatgcaaaatgtgtttttttctttaattgccttttgcttatgtggaaagagacagtttagattctaacttctgaaccataaggaatttaacaaataaatgaatttaaaacgcaaaagttatctggttgataaaatataaggaatgaatcacggaaacattccactagtccggccaattcaacgagttactactagtctactactactaatcaaatattttaatcgatagaatcaagtcatccaataaaacactcttggggttcgtgatacgacaccattaatgacaatagtcataaaatcccactttttatcatcaatcaatagtagctattttaatgttggattttgtcagattctattttaatgttgaaaactacgtgtaaacgccatgaaaaaatctctttgattaatcgatttaactttcatgtgggtttccaaaaatgtgaaacttcctaatgaatagaacgtatcatgtgatcacatcatttgggattaaaaagaagaagaagaaaaaaaactcataaggaatgtgattaaatcaacaaaaagaaaacaaatgttgtcgtttggtaattgcgcgtgtgcgtccgtcgagggagggccggtgcggagaacaacgtcacatatatctgtgagtaaccccacgtctttgattgtcggttcggtctcatccaccgacactcgaaactaaattttcatttgttttacaaaactatatatagatttttgttttaaatattgagatctttttcatatctatcgatttcatgcgtcggtccaaatatgtctagtagcaaatttcatctttagtttggttgccttctttacctgacgtcatttttcatagggacaacaataattccatggttagctgcttaactatagtagtctcagactttcaatttagaacaaagattgggttctagttgacttttagtttcaaagaaaagtatctaataagtcaatccaatattattttggtttagtttggattacaatattcttttgcgatagtatatctaccttttggattgttttggtttgtagtttttaaatgacatttattcttatttaggtttggtttaattccatgtttaggtcaaattgcacttaagtcctcagattggagagaacaacaatattagtctaacccttatcgccgccaaatcctcagattcgtaatctttaaaaatgattttctgggtggacaaccttacacgtagttgaactaccgagacagaggtagatgaaatgattttgtttctcttgttaaactttgaaggtcttaacattttaaatgttgaaatttgttatccatatttaacaaggattcacattttaatcatatatcgtaaccggattcaaatttgaccatatccacaaatcgctttcaaacagaataaattaatcgcatatagttaagttatatatcaagtacaagttaagcatgaaagcaaaaatgagagagagtgagactcgtttctatattcacaagatggttagcttttgtctacttcttctaatcgcataaaaaagaacgccgaaagtgaaactttttaacaaagtgggttcggagttcgcattgtgtgttcttattcaataaacttttgttgtcttttgagaagttgaaaatctgagagttcacaaagaaaaaggaaaaaagaaaaagaagagaggagaggttagtagtagaagacaatcttttagtgggatactcttgcctagcaccgggtaagcatcatggggtctactctcacgtctcattccacattacgacaacaacaacatcatcaaaatatggcaatctgacttggtcaatttcttaaccatatttgtaaattctctcttttcagttatctattgattaattgttgaatgcatcaatagacacatatatgtattgggggaaaaagcagattcttttttctgttctttcattctaaagcataagattgaggcagatgcatttttttcaacataaagaattagtgggtttctaatttttataagatgtttaaacaaatttcctatagtttgtcgttttttttttaatgaaagaacatgtacagttattttcaaagtttattaagttattcctacaactgcctcttattatttttagcatcaatcattttataaaattttgtaataatctgatataaaatgaaatggagaactactattttgtgttttcctttttgaatcgacgtgttattatattctcaaacacaaaatcgaaaatgagcctcgaggcccaaaaattccaaaatcccaaaaccaagttattttatatgaaaaatatcatgcaagattttgaaattggattatgctatgtttgtttacgggttctcgccagcaagtacccgtcaacaattcttatttgttatgtagtttttgatctagtaataacatgtttaaggctttaagctaacgacagatcatgtgtggaatgtggtcgtttcatagtcgattacgtctgactaagaaaaaattaaaacggaaataatcacccacttttactacaagaacggtcacggaaagaaacaacccaatattcaaaccccaaactccactcctaaaacatgatcaaaccctagattagaaaacaagagagcagaggaaagacaagacccatctacgaggaaacttgggtggctactgcagataccatcgagttaatcccacatatatcgtgcccacgacacagcttgtagtatccattctctccccactttttcccccacgagtttttgataatccaataaggtttattactaagccgcaagatcgaaaacccttttgatccgtacccaacaagaagtactccgtggttaacgtttcgcttgctgcatataagcggacatgacactcctcctatatatgtttgcatgaacacggcgtttaatcccactgtggaacacaacaacaaagcgtgtcaagaaaactatctaaagactcggacttcaaatctgttttatagttgcacatatacattagctaatatatatcacctgctaagggaccatgccgaactaagtttgctgcgatttggttctcatccagtggtatagtcgtgaagttcagtactcttaccgcaaccttctcaggatcaaacttgcaatggcctcgtttaccagtgtaaggatatgatctttcttcttctaatcctcctgcctccatcaaatactcgtaggcatttgtcatcagtcccccgccacatccattgtcgcatgctttcttgtcctttggatcgactatactcatatatataccaaataaattttcaaattacaaggatcaagtcaagagtacaaattcgttgattaacggattaaaaacagaccgcttgatcacaatcgacaagttgttgttcgctaagactgaggagcttcccggtggagacgaaatgggctccttcagctgctcccgttgtgctaaaagcccagcacgatccacatgcacccttcacataatcacatgcatgatatatggttaaactgacaggcattgaagtttgtatgatgtaattgtcccacaaattaaccccaaaaaacatttgtctcacaaattagacacttctgcgtaaaagtatcaacttactaccaagtgatttatatatccaactaatatcttttttttttgtcatccaaaattaattagagctcaaaagagtcattcctgagccaactaatatcaattacttagataatactcttacctaattagtataattacgtgcctaattacaaaataaaacaaatggtaccacctagagaactacttctccttatgtttttggctgcatcaaaattaatagttcacattctttctaagttgcaataaaatatgtaagccaagcctaaggcaaatcatatggatatatataagaacatacttgattcttaacctcagtaactccacccttctccctccagtcaaaatcttcaggcaatccatcaacctcaaccataggtgcctccgctccaaccgtaccgccacggctgccgccaacatcggctactccagtgtacatccgcttgaactcctcttccgtgaggtcagagaactgtgtgactccgtggacggcggaggggtccatcatctggtgctctgcggccttaaggacgtttttggcaaatattccgaggcggtggatgtactcctccctcgtggagtagttcttgccgtaatcggacatgaaaagccggaatttactctctgtgtgagtcccgagaagattcgggcgaattcgccgattgtcggccgtgacttggcgtatggtgaggtcttctacggaagctacaacgtggcagaataagatgatgcatgttatcagctgtgctaaggctttagccaccatgatcgctgttatcgatgggtcttgttttgaggtggccttactgagtccctagagaatcgctggctttgtgtgtaatttataaagatgaattacataagtttgaggtaacgaaagtgttggagatacatgcagagtggaaacacgtgggatgtttgcatgtagagctagacaatgaagctgcatgacgcgtgttgaaagttatcaatgagacttttagtctttgagtctagaaaaaaactagagtttggtttagttttaaactcatagatcataaaagtactggattaaaaaaaaaaaaaaaccttattccttgttccattgttttgtaatgttacaaatcagacactacagcaccatagatgtttctctttgttggaccatattggtcagatggtcaaaattcttggcccaacaaagaggcttcggcctatatatatttagttaagggatttaacaagaagaatgttagaccatccttaatggtagtctattagctaaggtttttatttttttttaatgaataaatttgtgaaattttattattaagaattttggtaagattttaattttttggcaagctcaatggtaatatattaaattgggattcttaaaaaaaatatatttaaaagataaaatatataaatattttattttttaaaaacttaattattattcaattcataatattcgatacatagatgacatataaaaaaaaaaacatacatgaaaacataaaatttaactattgatttctgctaaaaaatttctatatatattgaaccaaatcaaattttaattattgatgtgcttgtcgattacgaattcgagttcgagtttccaatatattctcgagatttgaaggcatatatgtagaataggtgaaatccacttgtgcacttctagttgattctggttgtaagaattcagagacatcaaagtaagtgtaaccatctcgttcgttttttactatcatattatgaagtattatacatagtagaagaattaatggcaagaaaaaaaattcggctttaatattattcccaaccaaccaaatcatgtcacatcaccactacattttatttaagaggacctcttagcttagagagcctctaaattgcttaattaacatttaaatttaatcatttacaatctaagaatctcctaatatctccctaatatccccctttaataatgctcttagagaattagattctacaatgtaaagggtatgagaaaatggttttgaagtttctcaaaattttaacaatcataatttttgttttatgaaattgcattttatatttaactattattcgattatgcaatttaaatatatacattttcttaaaaagttttccggttaatgatgagaaaattcaaaacaataatatacattttactcggataaaacaatgatttaacaacaaattatctatcgtttggttaaaaatacatctccccaaaaaatttgatctcctcctcctccttcattcttcttacatcaatcttgtatcggtttctggtttcgcctgaagaacattcttccacaatcccattggcctaataatgcatttctccgatctcagtttctccctccattcatcgctttagaggtaatcacatatatcaaatcttcttcgtttcaattcctctttacagattaacctcgttttctctcacagaagaatctttttttttcctttcatttcaagaaaagattacattttgattcggaatcgaagatgttcaacaaaatcataaaactgggtcagaagaaattcaacaaatcagatcaacatcaccaagataacaacaacaacaacaacaatacctccaccaacaccgtcgttcgcggcagccgtaccaccacacccgctccatcctctgtttcaaatggagaatctcagacaacagctcaatctccttcacagacaccaaaccacccaatgttcacaacaacaccgatcctcgaagtacttccattgttaaaagacgtgtcttcctcagatcgacctcttctcttcatgaagaaagctcacatgtgttcttgccactgcgatttctctgatactttgataatgccacgcgagaaagagatcaaaagacagacactccttgaattggttgatttccttcactcttcttctggtaaagtcaatgagacgatgcagagtgagcttatacgtatggtttctgctaacattttccggtgtctcccaccggcttaccatgagaacactggtgctcctcctgaagggaatgatcctgaagaagaagagccttatcttgagccatggtggcctcatttgcagctcgtttacgagcttcttttgcggtatgtagtctcttccgaaatcgaacctaaaactgcgaaaaagttcatcaatcacacctttgtctcgaggttacttgatttgtttgactctgaggatcctagggagagggagtatttgaaaactgttcttcatagaatctatggcaagtttatatttcaccgaccgtttatcagatgttcgatttataacattttctacaagttcttgtatgagactgaaaggtgtattggcattggagagttattggagatcttaggaagtgtgatcaatggttttacagtacctatgagagaggagcataggctgtatcttgtgaaagctattttgccactacacaagtctaaaggtatctcgatttaccaccagcagttggcgtattgcgtgacacagtttgttgagaaagattataagttggctgatactgtgatccgcgggttgttgaagttttggccgcttaccaattgtcaaaaggaggttctcttcttgggagagttggaagaagtcttggatgctacagagccctctgagtttcagcaatgtgttgttcctctgtttacacagattgggaaatgtcttaatagtgcacacttccaggttcgttatttcaaaacctaagtgaatacattgttttggcttatatagtgtaattgttgataagagatggtgaggagtgcaggtggcagagagagcgctcttcttgtggaacaatgaacatatcgtagggctgatagctcagaacaaagacgtgatctttccgataatctttgaagcgttggagaggaacatgaaaggacattggaaccaagcggtgcatggtctctctgagaacgttagaagaatgtttctggagatggacactgagctctttgaggagtgcgagaaacaatatctcgagaacgaagctaaggcatgcgagttgttggaacaaagagaattgacatggaagagacttgaagaagctgcttctctagctgctaactaattctcattgatgacttttttttagctatatctttcttttcaaaagtaatgttttttagaaactctctaataatttatttattcgtttgttctttctttttggtctcttgtaaatggcgaccgggaatagtactccacacgtccctgacgagatcatgtgatagaagataaatttagtgctgttcattgcatctattgcaaaacttggtaggaatttagtgtttacaagcttacaacatttttacattttctttgatgatgagttgacgacaaaaccgaaatcattaacaaagaaaacaataacgttaatcgcggccgagacggtgcatcgcttctgaatatcatatcgaatacattgttgtcgtctgctgctgctgcttcctctcgttgtaccgcccataccacccatattattgatccatagaaaaaggaatcatctttcaaagtacaggtgtgtgtgtttaacttccgatgaattcaaagtcttttgtgttatgattagtatcagaatgtgctatgtacagtgattgatacattaattaccatgataattctcattaacgaaagctgattttgatgttcttttatatgtctgatcgaactgataaaaggtcgaagaacgtgcaaagcccatcaactgcaaagcccatttgatgaagtccgttgaatatatttgtatcttttcgaccaaccagttgtaatttttttgtgtttttttgtaaacgaaataaaatcatgggtcttacgtaatttaataaaaataagactttggaatcttttaatagttttacaaagtcaaagtcatcaaaaagatttttttctttttttttgatagtcaaaaaagttaactatttttccaaatattgtaaattataatatataagatatgttccaaaaatatttttaccaaacatatatttatttcttattaaagctaaagaatctataactacaaaggaaaacaataaaaatttacatatttgaatactaacataaactaagtacataaattcaacgttacatgaatgttagtcatcttcactctcaaaaataatcacatgttcttatatctataaatagggtgtttctaagttctatttaaccacacctacataatttaatttacataattatgactttcaataataaaccttattttataatattatttgtgatctattctactcttattctttttgtgtatgcattagatttttctaatgctcctgccgaatcaccaagttcgggcactgacggctttttacctctagctaaaaaacatgttgtaattcacaataaggtaaaaaataaagaaattttgaatgtacattgcagatccagtgaagatgattttggaatggtccatattccttggaatagcacatgggatttcagctttcatgtcaacttttggaaaactacgaaatttcgttgtcactttacttggcataatggcggatctcattacttttatattttaaagtatacagagatgataatccagatggacgttttcccgtttgtaaagaatgtatatgggaagtaggaacagatgatggaaatcctatttgtcgtattcctcgtgataagaaaagcaatccatactgtttcaaatgggaggatggtccttaagtaagaaaaaagtattattatcactatctcttatcaaatgaatgtaataatcaaaattgattgaataaatatctaataccatctataatgttggaatgtttgacaagctttctttattcaaagtttttacatatccacataagtaaaccaagcttctttttagattgattatattatttttatcttacaaacatccttttgaaaacaaaacttcaaactctattgcaattagattcgactgttgttccaatttagtggagctaattcacagctaccagatgacaaacaccatctaagaaattaacttaatgagccaatgaatcaatcaatccaagttctcaaaagatatgatagcaaacaatcacatctgaagcctatgcagtaacaatttacttgctcatgacttaaaaagttaaatccttctttttataatccggactggaaaaagaaacatgtttggccattgcaacctatattgttaaggctctatgttttgttgttgaatgaactcaagatccttcatctgcatttgaaatagcttctttagacaatcgttttgccataacattctcttcctctcctccttccgcaacccttgtcgccttctctctgatgattctctctatctcagacttctcaaccgatggaaaactcgctattagcatcacttgaagaagctttttcatgcggcaaattttgctatattaaaaatgtgacttctacacaaccttaattttcgttagaggaataaaaggtagtggacatagaaagatgagaatgctacatcattgatgaaacaaagcatttgattggatgagacaaagttcgtctttgacgttgccttgacaatcccattttagtgttttgtattgttgccaatccaactacaattaaagaaaataatggagagagagccacactttacaccaaaaaccaatcaattgaacggtccaaatcctatttgttatccattcgtcacaataatagagttgataacgacaaaaccgaaatcattaacaaagaaaacaataacgttaaacgcggccgagacggtgcatcgcttccaaatatcatctggaagacattgctgtcatcgccgctgctgctgctgcttcctctcgtcgtacctcccataacgtccatccctccaccgctgctcccaccgctgctcccaccgccaccgccgtcgcctccataaggagagtaagaattgccactctgaccttgatcatccctaaccccaccaaaaaccatctcattagaagttatacgatattattcattctagctaaacaaagtcaaaaggatacaattaatgcgatttaaaaggacttgtaattattattatggatccatagaaaaaggaatcatctttctaggtaagggtcccaatcgtccttaacctccacatttccatcataatgacatcattacgaccaaaaaaacctattggcttttgtatagtaaattacatttgatgtatcaaaatgtagtttgcatcatgatcatgcatgtcttaattaacattaagacagacatttccaccacccataatcccaaagggacaacaaaaatgatgcaatctaaaaacttgaaaaataatgcaaaaatgaaaatagcaagtggggttaattcagacactagtcaagttggtcggttccctaagtagacaatcacgtgcgactctacatgaattctggaatactgccaaaaccctaacgtctgatattctcaatgagctactttttcaaataaaccaataatgtgtcactttaattgtttatacagattctaattattcagacttaccatagttcctcttctatatatcaccatttcaagaataattgaatgaatgaatatagaatgtgattaagaacctcaaacaagaaagaacctatttatcctattttccaataagaaattacaaattcgtcagtttagagttttctttttctaatcacaagttaactagactccaaagtaaaagactaaacacaactaaaatagtaaaatagtacggttgttatctgttcttgacttaacgaataacgacaataacaaatcatgcgctctaatcacgcgctttcacagctaattttattatacattaaacaccgaaatgagagatcatgcttcagtttttaaaagatttttctaataagggagtatacttttaaattggttaaataaaaatctaattagaaaataaagaagggtaaaaagggaaaaagaaatagtacctgggaccgccaaaaacgccagcgtttcgagtgagctggtctacgagagaagcagctttagggtcaacactagaagctttagagtacattgagctcattccttcaccagaggccacaaagaaagctccattctccatcaaatccccttctgttctccaattccaattcgaccattcaccatcgtccttcgagtccactcgcttcgtcacctgcttttcaccaccgatcagcaaacaatctcttttccacgcgccgtcgttgcgcgtggtggtattcaaacaactaacaacaacaaaataaagtgtgtggacagagaagaagtagaagaagcagcccacatgtctgtcatgcacttataatactatacatacataccatcactgtctcactcctcgtagacccaattctcataaaaataagattcttccttttcccatttacatacaactttaactggatattttttcctactagctaaagattaacaactgtccatgtgaaatatgaactggattcatagaagataggaccatactcaaaacattttacaacccaatcaaaatcaactaatgaaaactacacatttgtcaattactcaataaaaagttctctatggtaaaagcctaaaatctatccacaaaatcatactaaaccctacaaagttaagctactaaagaaagtgttccacaccatataacaacaacaacaaaaaggaaagatatttctatatgggtaatccaaaaaaatgtaaaatttgttatataaaaaggaaaaaatacctctttggcgctaggatcagaaggagcagagtaacgatttccttgactgttaatggtgggattaccactaccaccaatagcatacattttccactcagtgaaatcattattcactacatgaatgtaacctctccgacacctaggcatcctctgaacaagcccttgtccgaaatgattaaacgctatcgtcacttgcatccccgtatcaggagcatagttatcatcatgacccaacaacataacctcgtcgtggtgggtgaagtaattgttagatatagttatagctgtagaacccatcacagcatcaattagcccgtcggtgcaatgactcattgaacaatgatcaacccagatcttctgagatccgaagatcgagatcccatctccatcggatctaccacgtttctcgaatccagctgaaggtttacagtcatagatatggaggttgtggatgatgatgtgttgaacgtattggagagttaagcaaccgtttccggtaatgtgaacggctgagccacgaccatctaaggttttgtagctgttgatgatgagttcttgttttagtctgatgagcatgtttgaagagaagacgatccagagtggctcttcttggattacgccgtaacggagtgttcctggtgttgggtttgttgggttgttgtcggatgagtcagttacgacgtagatcttgccgtttttgcctccgagtgtgccgtgtccgaagccgattgaacagtctgctagtctttgtcggtttgttgaccagtctgcgtcgctgcatctccagcaatcgtcgattgggtttccggtacggcaagaggatgatgatgaggaggatgatgatgatgaggatgatgatggtgagcttagttgtcttcttgcaagagattcatttacactcctgtgaatttcggagaagaaagtttgagtttttattttatctgggaaaatgtgtaatgagagagggaggagcttttgtttacctgatgacatggagagcgacggaatcaggggaagggtgttggtgagggagagtgagatttaggggtttagtggcggagaggagtgtgaagaagaggcagagaaggaaaatggtgttggagaagttttgaagaagcatcgttagtggcggattttgacttggtgttgctagatttagctgtggaagttgcagtgtgtgtgttgagtgtcagaagaagaatgttggtagagaaatgtgaagagagagtagcagagaaggatttgaaatccacataagggagaagaggaggagaagaagaagaagctgctttctctctcacactctctctctctctgcttctctgccctcttgctggaaacagggctaataggttttcttgagattttgattctgtttctcttggggatttgtgtccacttgcattctggaggagattggtttactatttgggtctcaaattttggtaagcaagctcgtattttatattgggcctctcatttctcgtcaaagtcgtcgctaaagcaagtttgtaattaaacacccaagttaaatgggcgtataacataaaagttaggcccataaccaggcccatcgtttatggtaattaaacacctaaattaaatggacgccgaacgctttgatgagtgggtcagtggccagtgtgagtatcaacggtgaggacaacactttgtcgttccgatgctcagcgattgtggtatcttctgataaaccaacttgttcatattcctttttccttgctatgtaccattcaagcttcgtttacatttaccctttcttgattcctagttcagactaccattctactagatttgaaaaggatatacagttctttgggcactgaaaatttctcagcttcacctaacaatctagcttgtttctaaggtttagtactgttcctctttgtgtccgagttttcacttgtttactaattggcttctttagctttatgagcctgaaagatgttatcttctttcttattagggtcccaagttctgtcgacagtaacaacagtaacttggggtttcgggtttcaagatatggatagattcagtgagttatctgatgaagtgcttattaagatattattgtttgttccaacaaaattgctgtatccactagcattttgtcgaaaagatgggagtatctttggatgtggttgcctaaacttaagtatggtcatagagattcttctgaatgcaagaggttggagtgttttcttgacaaaaatctgccattacatagagctccggttatagaaagcttccgtctttacttaattgattcaaaatgcacacctgagaatatcaagatgtgggttgttatagcagtttctcactgcctgcgtgagctggaggttatttattcttcatatccggagaagccaaacatattgccgagtaacttgtatacctgcaaatcgcttgtgatcttggaactctgtggcgagattcgcttggatgttcctcgaatggcatttcttccctctctgaaaactttgcaacttcacagcgtgagatacctcaatgaagactctcttcatcggcttctatctaactgccctgttcttgaagatctattggtggatttacttttgtcagacagcatggaaaagctaactgttgttgtcccatctttgcagattttatcactctttatacctcattcttatgagatcgatgggattgtgatagaaactccttctttaaagtattttaaacttatagaccataacagtaagagtcactactgtttggttaagaatatgcctaacctgatagaggcagatatagatgttgaattacatagcatcaagagtcttattggatcaatcacatctgtcaagcgtctttcaatatgttcacaggtatcattttctcaactcattgtttagatatgcatttgctgataatttttaatattgcgcaggctatgtatgatggaggttttgtcttcaaccagcttaaacatctgaagctatgtagatgcaaagggcattcgtcggatttacttgtccgactgctcaaagattcttctaacttacaagcactagacctttccgaaatggatgtaagtttgttcgtcaaactcttttttcttgtctgatgcacattatggttttagtgtaattcttcttctgtttgatctgtaattcttcttctgtttgatctgtaattcttcttctgtttgatctcagtatcatgagaatcatgatatcctttactggcatcaaccaagtactgtccctgaatgtatgttgttgagtctccaaactctcaacttgtcggcatatagaggaacaccagaagagagagatcttgcagtgtatttcttgaagaacgctgttcacttgaagaccacaacaatcaagtcatgtgtttttgatgatgaaagatttgacatgttaaaggagttggcactttcttctagagcttcaacaacatgccaactcgtgtttgattgagagtatttgatcaccaaaacaaagcttgttcttcagttcttccatgtccccgggctcgtatggtttgtcttcaacctgaaaatttgttttcgtcaaccatctttttctatgttttccgttttttttgtatgtgataaaaactttattctatatgttgtccaccaaaaaacaaattatgttgattggagaagttatatgataagttttaatcgtttatggggttttataggtgtgtagagatatatacataccttgtgaatgaagaaaagagaactagctctgtgttgaaaaactgaaaagcatttgatgccctgataatttctctaaaattattaaaccgaaatactaatacgatccaagtggaaccaaccaatttcttaatatctaaaataccggaatctaaagagtcgaaccaaaccgaaccggaatgtcctctaatttttatttttaaacccatgattatgacatgcactaccggcttagtggtgatgtttggcaacatggtttattcaattctcactcgcactgagtgtctgtggctcataaatcatttaccttttcaatttctcaattccaaatctaaaagtcgtcaaaaatggctctccgatctgtcaaaacgccgaccttgataacttcggtcgccgtcgtctcctcctccgttaccaacaagcctcactctatcagattctctcttaaaccaacgtcggcactcgtcgtccataaccatcagctatcgttctacggttcgaatctcaagctgaaaccaactaaattccgatgctcagcgtcggctcttacgccgcaacttaaagacacgctggagaaactggtgaattcggagaaagtggttctgtttatgaaaggaacgagagacttcccgatgtgtggattctccaacactgtggttcagattttgaagaatctgaatgttcctttcgaagatgtgaatattctggagaatgagatgttgaggcaaggacttaaagagtattcgaattggccgacgtttcctcagctttatatcggcggtgagtttttcggtggttgtgatattactcttgaggcgtttaagactggagaattgcaggaagaggtggagaaagctatgtgctcttgatcctgatttcaatacttggtttttgtgatgatggaatttgatcttatctatctatctatcacctgggaaaaaaaatgtgattttgatgtttcagagtttgtggttgtaacattaagagacatatattgtatgatggatttaggtatacaacagttggagttgcttggaatttgagtttcctttgtcatatgtgttggcctgcaaatttgtgttgtttgttgaaaggtttatgtgtgaagtagtgctagtagaatctaagtttgtttctgactaagagacatgaagtcatgggttgttatgctcattcatatcctgattgagatacaatttaaagaaacttagttccaaagattctgaacattcaccggtacagtgtgtctgcaaatggtattctgtctcacttcaatgtctaaacacgttgtctcaaaatgtatcgtttgttagatactcctttcaagacatatgatttagcctcgcatgtgttcgttgatccaagttttaccggtttgataagtctccagtcttagcaataaatccagaccggattcatgaccaatcgcagatttaccggtccgggtcaagttttaaaacattagtagaaatgtgtttcaccgaacaggaagacttatctgatagcatctcgttgcagtggataaatggcaaaatagtaatatacgtagattctgcttttatctgaaccacatagtgcagatggatatcgaacagaagaacatgatatcgagaagacacgtggcccaatgaaaaagccacgcaggctctgtatagccaattgcaatctggttttagattctcatctcacaaatcttacttatacgatcagtctcccacattcacacttccaccaaacacctctcgtccacatctttctcctttggtggcaaacacaacgacagatagagagaaacgatggcgtcgaactcgcttatgagctgtggcatagccgccgtgtacccttcgcttctctcttcttccaagtctaaattcgtatccgccggagttccactcccaaacgccgggaatgttggtcgtatcagaatggctgctcactggatgcctggcgagccacgaccagcttaccttgacggttctgctcctgggtacgcttcgaacccttttactctgttttgttgctcagtttggaatcagaattgtttgttagattactctgttttgatgacatgatgcaacattgtacgttttgtgaaagattcaattttttttatgttattgggtattcatatttcagaaagttgtctcctttcagaatttgaattccctttagttgtgtattcagagattctagatagattactggaacctcttttgatgacttaagggttctgatttcaacattggaggttgtttagaaagtttcagtttttctaagttattgggtacaacattgtgcagtgactttgggtttgacccacttggacttggagaagttccagcgaaccttgagagatacaaagagtcagagctcatccactgtagatgggctatgctcgctgttgtaagtttcaatatccaatctttgtcttatcataagggtttagtcttgttaagtttaatctaatggacttggtgggtggtgttgtagcctgggattttggtaccagaagcattaggatatggaaactgggttaaggctcaggaatgggcagcactaccagggggtcaagccacttacttgggaaacccagtcccgtggggtactttgcccacaatcttggccattgagttcttagccattgcatttgttgagcaccagagaagtatggagaaagaccctgagaagaagaagtacccgggaggcgcatttgaccctcttggatactcgaaggaccccaagaagctcgaggaattgaaagttaaagagatcaagaacggtaagcacacacaacaacttacctttcttgatcaaacttatgtacaaatgtatatctaatgttggtgttttttgcttggtgggtgtaacagggcggcttgcgctgttggcgtttgtaggattctgtgtgcaacagtcggcttacccggggacaggaccattggagaacttggcaactcacttggcggatccatggcacaacaacattggcgatattgttatccctttcaactaatgaatgtaaaaatagaaatatgtgtaccttatgagctttatgtgtatcaaaaacactgtgtaatgaaagacagatttgtgaattcctgtaatttgtcttggtgatcgaatgctcgtgtgagcttgaattctaagtgatgaaccttttgaacccaaatacacattacatctcatgcttcctacagaagaaacattgtaagctcatgactatttgttagatttctcaacaatcacattcacatactataaactccataacagaagaaacattgttagctcatgattatttgttagagttctcaactctatccaaatatgctttttgtttatatcaacttagataaatggttattgaaccacaccaagatacatgcattttacatttgagttttgatgaatattttctattcatcttttttccccctcatttttaccttctacattttttcatattgaacaaaaacaatcctgttaattttcttccctctcttttctagtaaaatcatttaaggattttttttgaaattagttgatgtctttcttatcacatttgttctatacttctactaatttttcttttgttcttttgcatactaatcttcacctacaaaatagagtactctctaaacagagtcttggaaagttttgtcttccttttatattctcaactataaagtttaaatgagacatagttctagaaaataacatctttgacattcaatggttcccttaattatatattgagctagaatttgaagaaaaatcaataccacattaatgtttacagattttaattcatatatggcttagtattctattattatatgattttctcaatttaattcattaaaatcaagtaatcagaatttcaaataatttattttatatttcaaaaaacttaaagaaaactttagatttgacatgtgacaaaattttcaccattctcttccaatataataaagaatggagctatcttcctaatcatatccacgtaagattgagatagaaacttgagctgcgtggggcatgcttaattttttctgtctcattgacccaaagatatatctgtattctagtggatacatacattatttactcattaccaactacaagtaaactcctttaattaatttttaaattctatatttggctcataaattattcctttttaaaatttatttttagttgatttttcattgcctactcaagatctaaaattttcctttacatataaaacctaaaagaaaacatataatgcagtttcaatccctctaccaaattttctgttgatactttcctcattaaggtaatcattcctctatcctctacttttcttatgtagcaaactttctctttctatcatgaattttggtttctccttagaatctttttggatcttgaatgcttctgatctgttttatttggatctttaaaaatatattcttcaccggaaatgccattgttttaatctcaatacatttcttaaggagatagaactagttctttgattgaaaaatctctgttttgttgccttagagatgaatgaagattttaatgaatgtaaacccaatgcgttaaaaaaggaaagatgtttttttttcttcttttgctatgagtttggtgtatatggtttgaatctttctttcataacgtattgttttctgagaaatctggtatgttttgttttcttgaatcttctagggttttccacatagctgattgatgaaaatgtcaatgaggtaaattaaaccaaccctttcttgtaacagttttcatgatttttgaaatggggttttaattggtttcttgttgtttctttatagcagcttgtgtggaaacctttgatgtttttttgtatgtggatgtgaattggtatactcgggtttattcgtaaaggaatgatcattcgattgaataagaatggagctttatactgcaaattgtctgtccaccgaaaacaaacctactcttgagctttcaaaactagtcaaagacgagaaaagctcggtgaaaacgaacagcgaaaacacccttacacttgtgaatcatggtacattccacacctcagcttaagaagatgactaactcttattattgccacattgtgttaccttacctctgtttttgggtgacaccgccggatattttaacttgttggctctgtaatttgatatttgatgttcttgaacactatctataaggatctttcttgattacaggtgcaaagatgtggcaagagaacagggaaaaatgggtgggagatcaatctcgacaaagaaaaaacactgcaaaggatcagattataaggtattatgtgtttcatcaacctttaagttcatctgacaatctttttgcagtgtcaaagaatcaaagaaggcaatgttttctaagatgttcttgaatctcttgcagctggtctactacatatgaagatcttctctcaactcatgaacctttctctgagtcgattcctttacccgtaagctttaatctaatcccaatatctaccttgacttaaaaaaaggaacctacaatcattctcaattcctgaattttccatttgatctttatgtaggagatggtggactttcttgtcgatatttggtacgatgaaggcctttacgattagaagaatctaacaatgccacgaactagattgacaaagaacaaaggagagattcaattatggtatgaaattaaatctttaggagttgtgaaaacatttacagatatgatgaactatctatttgttatatccatatactgtatcatgagaaaaagactgactactcatatactccacatctttaacatttatatgattgttacaatgacaaggaacaaggattacaagattttgatcaccttatagcaaaatataaggagacttgagtttgtttgaccatgtattccatgtttctcaacatcatcaatcttacatggaaaaattggctacatatttgttacacaaatgatcaaagaacatctcgaaacagagacagtataccagttatcacagcacataatctcctaacactcatttcttataaaaatcttagcttttctctcctttactgtcgtcaccaatcacaaagtcaatctaatgacatgcttgtagaatcagctacgaatctgtgtccacgccagttatgttatgtacatgtcttttctttcacctcttgttcagcttgagaagtaagggtttgttttgagtatcttctttgctaaactgcgaatatcatctctacttgactccacagatattcttacaatctctgtcacgcttcctgttcttttgaaatcatttgcattttcctctgcatcgagaaggagatacacatattagtcatatgtcccaaccgcacaaaatattgataaagaagtacttagtgtctccaaagagctgagcatgctcttctagatagcagaattacaaagtgtggcctaccattttgagctaaatggcaaagcgcaagttcgatgtgacgttgtgttgatgctgaatcaatatgtgaatttgaagtcaaccattcaagaacaccctcttccaacagaagagaacggccttttctacgccctgcaacacattacaccccctctaggtattttagcgattgacacagttgtgcaatttttgaggtacattggtaagcaaatatgacaacataccttgcataatttctcgagtttcacacttcgcaaaatttgccatccctcttgccacttgagcaatgatatctatgtttccagactgtgccatagtgagtagtcccttgatgccttcctcttctttcagcagcttaagaaacttctctgtttgtgcaaaacacaacagtatatagagttagatatgtacttggcagcatcccaatacaaagcttctttaatatatctttacacataagttgtacagtgaatactggaagtcatcagaagcaaaattcttaatcttgtgcttaccgttcccacataaattggcaagcgcaccagctaccattcttagagtctgtggatcgtctgttttagtcaccatctttgctaggagttgagcacctcctttattcattataagatcttgactcttctctgcggttaataattcaatgaaaacatataaataaaccaatcacatattttccattccaaaatttaataacttgacagcagggaaaaccatggcatgaagaaccgtctattgcatcttacatatctaacattcaggcctcgtaaagaaatgacacaaccacaagggaacttaagttctgaatcagctctgcttctcagtagtaagtttaacggatttatgatatcataaaagcaattggaccaccaagagaagtgctcaccgttcattgctaaattagcaattgcaccagaagccaccctgagaatcgttgaattttgagatgactggactagcataagcaaagcttctacacccccttcctccacaatctttacctgattagcctctatacatacacacacataatgcaagttatttaggtgctgtgacaaacaaagaatatttacacatgttaatagagcgatgaaactgcaccttcagcggctagattagcaaccacttttactgcttgaatttgaacttccaagtcttcagacttaatgagttgtaagatcttctgaattccgactaaaaccgaagtagagaaggtgtcaattaatttctcccacaatgaagcgaaatataagaatatcaagctaaaaagatctcaatccatgagaaaatttataccttcttcacaaagtctagccatggtagctctctgaccagataacgacttttttaacccttgtgatctctgagagccagtttgagctccagattctgctgatccttttgaaagatcttccttcatatatcgcttttcctgtggaatgaaattgacttagcaagaccataagtacacaatacatgttaaaagttgaaacaagctcatcgtgattcacctcaacaacattttcactttcccttagattcttctttagttttgaaagctcactctccatttgctttctctgcttttcttccaaaaggagcctttccttcatatctcgaacctcttcaccaagtttttcctatgcaatacaaattttatgtacatttagacatattcatcagcaaaaattaacagttggattttgaatatgaccaatctgaacaacaagtaagcagccatttaacagtcacaccttttgttggagcagatcatcatagtctagtttcactgtctggagttcatctactgtcgattcatacatttgtgaaagttcttctaattttatcttaagttcgtttgcctcttcattttcctgaacccaaaaccaagaaaaaaattggagacagaaatttttgcaagagattgacactgtcacactcacctgaaacataaagctgaaagtatcatatgcttattgggatccagttttaagaaaatcaggaataagcctaacctgtgatataacttggcgatcgcttataagccttttcatttgtctaagttgatcttctgcagcgttagaccgagcattttcaccttccagtttcttttgcagctctgcaattttagattcatatgtgtgagtggtttccgcaagttccctttgatattggtaattgcccttctcttgttcctattaacaccaaacataccatttagtttaaaaggtagaaaaaggaatcctaagctataacaatttatgatgaatggtatcatagtaactaacatgaatagacttctgctgtttactcaaaatatttttcatttcagtcaattgatgctcggcgtttgtagaccgtgcttgttcatcctcaacccgctggaccaactccgcaatttttttctcatatacttgactggtatctgcaagttttgcctcatatgctgaattttccagctgttgctgctactaacaattaaaaggacactgtcagagccatctattatacacagctcaaacatatttatgtatatgtatttgatgcctggcctttaagaaaacattcaagaacttctgtaagtagttaataaagacaataacagagaagtattgatccaacaatatactgaagtagttaccgagaaaactactaacaatacatgagagaaagtgtaccttggtatttttcagtttcatctctaactgtatggctttgtcatgcattagatcacactgatctttctgcagttgcagatccttcaaaagttctttcatgctgagctccaagcgggtgttttccttctccagaaactgtaagtcatatcatagaaatatacgcaacatatcaagaaactagttgaatatcaataactgtgagtaaacgcagagtagctgatctttagaagagacaaaaatacctttgacctagtaaccgcgttcttttctgcttcagcgaaggagttttcacattctctcaatcttttttccaactcatgtttctcactatttcttagtttgttttgtctttcgacttctgcagtaagatggtccacctgagtctcaagcttccgacacaaactctcataatcaaattcttccttaagctttaccatgtttactattttcattgcctataaaggaagacatgaccaagaagacattgctatattttgtttttgaaagatataagattgttcaatattaaaatatagtctttcttatttatgagtttctttagatgtcagatactagagattctgcagagaacgagataagagaaacatgaaaactcaccctttgtccaaacattattgtgctagtggtttctgcatgataacgtgcagatggcccaattgttattataagtgaagtcctcgcagaacctatttgttgagagacaaaagcctatttcagagtttatttaactaggaagatatgacaaaatgtatagacactgaagtaagccacgcttatgagttctatatctagagaggctaggaaatgttttggtcaactaacccccaaaagaatcacgcagaagccttgttagcttagaatctcttgttggtatatgagaactgccttcagctaacgcatttatgcattttcccagggatgtcagtgaaagattgatgaattttgcttcttcaatcatgtggccgtcagttccttcaggaaaacagcatataactcacaatgaaactacttgatataacatgaatggttattatatgaacaggtaaggagttcaaaccagatttattaattctttcggaaccagcaagatcaacaattagtagtttgctctttctaactctaggaatggctttatctcccaatgattccggttttgccttctcagttttttcattcatagcacgtctaacgtaaacctgcaaagaatatacatttcattaatcggcaggtagaacacatggattttgttgatgaacaagaaaccatagagaccaaaatatcctaaggaagcacaccgtaagaattgcatgactacgagaggattctgtattcatctttgtatttgctgcatgacggtttgtctcaccgacttgcaaaacctgcaagaaatggtctaaatcttgaatgttaactactgtagcgcctggtactgatacttccccagtctttgcatcctcattgattgaaatgttgtttttctcaggtgcaagaagatcttgtatagtttccatatatagctgtgaattacaagaacaagtaaagatattagaaatggttcttatatatgctctagaaccatttccatcttctgtctatgaatgttcaacaagaagacaaacatctaagcactagagtgacacctgcaaataggagatctcgacggaaatcgaagcagaagatgcgttgagaagtatatcctccagagctctaaccataataccacgctcagctgcatcatctttaccaatttttccaaccgtgtaagttttacctgtgccggtttgaccataagccataatggtaccattgtatccactcagaacaccctgtaaattcaatgtagtagatatcaataaccaaaagtattacttcttaacattccaataagttatataaacatcagacactttctaacctcgacgacaggttttgctactccttcatagacacgcttttgcgaagctgtgtctgtaaagacttcatcaaatttgtatgactcagagttccagttgttcttcctcaacttaagcctctttatctgtacacacagaaacaaaacaaaactttgtaagaatataactaacacagagttgaaagagagaagatgtgattagtgagcatctaataactcacttctggttgtaactcaacaagatcagcaaaatcagcatccgagataagctcctctccgtttcgaggtcgaactcttacagagactcttaccctcccaggatcttcatagaaaagtatgaaactttaaaaacagattatgccaattagtgcattttatgaaagtctaacaatgcaccaattcgaatcaacaatctctgaatcgaatgtagaaaaagtcaaatactttaagaaattgaaaaaaaaagctcatctttcaattgtggaatcatacgggtgaatatgaagagagaaggagaaaaaggacagaccattgtcgtcgtcgaagtctttcgattgagatcggcgaacgggagtgccggagcggcgtgtggagggagaagaggcggagacagaggacgaagaggaggaggaggaagcggagggtcgatctttaaggcgagaagagtgtgctattccgggagcgacgatagaggttctagcaggcaaattcaaggaagaagaagagagagataccgcgtgattgctgttgggaggcaagtgctgctgaattcgctccgccgcgtgtttcgccgacgatctgacggcggaggaggaatttgacgaactcattagctggagtcttcacgaagcacgaaagggcaccgagaagagaagagaaagagagtatgagacaacaaagatagagagagctaagagaatgtttcaaagaagtagaagaagaagagaagagggaggcacgactgtgatgaaaatggttcccgcgttcgtggattttattcggtttggtttctccatttggtttggtttggttaaggtcggtttcgatattagcggttagcggacaagaataaattttaagaacattacaagtgaaagtataaacgtttagcgggtccaaaatgtgtatggaccatatcgataacaacgatacaaaatctagtaaagtggatcccctattaatatatgggctcatctacggtatcaacatctctaaacatagtgatttgtcccctgatgacagaataaggctccgaatggtgattgtgttttatggtacgagagaagtgcggtgcggttaaaatagtaacaaaaatacatagatacatatgtatgagtagagattttgatactattacagcactgttgcggtgcggttttgggtgcggttttggtcaccattcacagcctaagaatcattaaaatcattaaaatagtgtaagagattttgataatcgtggtctggtcggcttcaacttgcataaactccatatttgtaccagcgacacatatgttcgtatcgttttcttgctatcatgttggtacatacactcttgatttctttaatgcaacccaaaaaaaaaaatctgactttatatcgttgcaattttttttcatatgaaaacaatgtttaaaaatgaggcccatttctaagcccatttatacagaatgaggcccattaggtgatttaataatcttctccgccgtgttcttccactgcggtggactatcgtcgctatcacacggtgcaggaaaaacaaacggagaaaggtcgatcatctcttgatcatcgtccatggcgcagatccccagcttggagaatgctcctctcaatctgaaatccattaggtgactctattttcattacttagagattgattgatcgtttcttcttctttcctctcacatcatatgtttctcgtttcttattcagggacaagtctgagagggagctcgtaaacttgcttaaagacgtaagtctcattactctatctttttttttttttttgggttgggagacgaaagttaggaaatttcgcggattatatttgatcaaacatatctcttttgagaatgtgaaaataaaaaccaatgctttgtctctcttttactatgaattcttctcttttctatgcaattacttcaccaatgtcgtatgattgagaatcattaggatgaatagacttcggagatgatttaccgatttctcaagacttttttgttttctcttctttttggtgtctttggttgtaggttcgtggaactaagtgtttggttattgatccaaagctcagtggttcagtctcattgatcatcccgacctctaagcttaaggtaatttcgtttttcttttaaaggttgagtttggttttaacattagtggtgatttgattttttgttgttctttgcttaacaggaacttggtttggagttacgacatcttactgcggaaccagttcagactgaatgcacaaaagtggtttatcttgttcgctctcaacttagctttatgaaattcatagcgtctcacattcagaatgatattgcaaaagcgattcagagagactactatgtttactttgttcctcgtaggtctgttgcgtgtgagaaggtatgtggttatttgcgtcctctaatactattgttgctttcgtttgcttgttttattacttttttgaataagggtgataaaaaaaatcattctgctattttcagattcttgagcaagaaaaagtgcataacctggttacagtgaaagagtttcccttgtatatggttccactagatgaggatgttatttcatttgagctcgagctctctgaaaaggtgtgtagaactctcatgagtccaattcttgtaactttatgtgccattttccgtgaggccttaaaatcacagctttcctaattatcttgttcatgattttttaatgataggattgccttgtggatggtgatgttagctccctttggcatatcgcaaaagccatacatgaacttgaggtttaaacattttcgttattctttacatctcgtcatcacaactatcatctcattactaactcttcctatagttctcttttggagttatatcaaaaatgagggcaaagggcaaagcatcagttcgtgttgcagacattctaaaccgcatgcaagtggaggaacctgtcaattcgaatgatgtaaaatacctgcaatagtttgaatgtcataatcaccagttatttcgctatcttgtttttgtatccttttttcactattctaaatgatgtttgttctatttcaggtgggaaggcctgaagtggatacactcattctattggatagagaggtaagattacaatgtgtgtttcctgttatttgtaatccttaaatacaaagatatccttcaaggattgaatgttaaagagttggtgtgatgtaatcattgggaagtctgaattatgttttatatgacacaaacgatggatttggaaatgtgcatataaaggttaagagatatagaaagtggttaaaatcccacttaatctggaattgggactggctgataccttgttaggcggtggttaccttttacttgacatggcgctattagtttcaaattttacgtttctgtttcaggttgacatggttactcctatgtgttcccagttaacttatgagggactaatagacgaggtaattgtcacaaattttggatactgcagttttgactagaagtagcttaagtagattttgcagtcactgcaactggtggactttttactctctgaggaagtgacactgacttcatgtatcatacttttactagtaattatgttgagtgttttcggtttctcttctcgtaagaaagtcttacacaagtgtgagatccagattagcttctgcgggctttttcattatcatgctgagttgatgtacttttctggaatttggggagggaacataatggtgtgaaactatttggtttcattggatgcaatgataaccaacaacaacacaattttgacttaagttatgctggctgattgagttttcctgcgagctgactccaacctttctttaaagattttgcatatcagcaatggagctgtcgaggtcgactcatctgtgatgggtgctcagcaggagggaaaaaagatgaaagttccccttaattcaaggttagttgatttgctcatagagaaaaattccttctatcgtctgagacaagtggccatttttcttctatctcactgctgaatgatttctgtaagcaaatatgatgcatggaatatatattttgattttcgtggattggataagtacaacatttcgctagtattcccgtgtattaattgttaatgcacgaaaaatagcttcctaaactggttattatggaagacacgtttgagtgttgaccttattttctgaatgcttaaatttacagtgataagttgttcaaggagacaagggatctcaactttgaagtcgttgtacaggttgacctttgcccttttggcttggattctttgttacataggattctgtttccttatcttccagatgccatatggtcgcaggttctacgtcagaaggcaatgaccatgaaggaggactacacggaaattaattctgtacgtttgtcgctctcctcctttaggtagacttgttttcatggtagaggtatacatacatatcgaccagacacttattggcacattgtgttaccgactttaagtagaccatgttatgccttaggaatgatcagcctattcatagagtttactgttagattattagttgtatccagatatctaatggggtatggttatataatgcacagacccagacagtttctgagctgaaggactttgttaagaagcttaactcactaccagagatgacagtaagtattgacttgattactatatgttccttttcttatatattgcaaacgttcagatcaaaatttgttccagtttaacttaattggttatgattttttctttcccagaggcacatacatcttgcccagcacctaacgacgttcacatccaagcaatcatttaattctcaacttgatatggaacaaacacttgttgaggcagaaaattatgacatgtaagtttctttttagagaaacacttattgtattttaatacttccattcaagaagttttcatgattctttctgttacaagggatgtggaaaacatgttactttgatagcataatggatattgaaatctatgatataattgattattactaactcttgtttttaaatgcagatgctatgagtacatagaagagatgatccataaacaggagcctctcactaatgtcttacgtctattagtcttattttctgttacaaactcagggttaccgaagaaacaatttgattatataaggcaagttaagcttccgtcagtcattctgtattatatatttcaattttctgttttttttttaatcatatcttgtcttcgggtctcaactttcagaatggaactactccacagttatgggtttgagcatgtggttacactgaacaacttggaaaaagcaggattgttgaagaagcaggtttggtgattcttggtttccttttagaattgaatcattttcttatattctatggtgaggtacgtctgacattctaatgtcttggtgtaccttcgtttggttcctgcaggagtttaaaagcaactggctgacagtgaaacggacactgaaacttattgtcgaagacactgatacgtctaggtaatcttctttttagtcatgctgtctcctactgaatacatggtacttcattgacatgattttgttaatgggataaagcttacgaagtaggtcagatgtttaatccagaaatatgagtaccttgataacaatgtgtgacttgaaagctctttttccactgctatatttgaaaatatccctcataatctctaatgcatgatctaacgacagcattgacttaatgccacaaatctcttatgcccttgaaagctcttttcaacttgcaagttttgttgatttgtgaggactccctcgttttctaatgcatgatcttgcatcatcattggctgaatattcagaatttatagcattagtaaatctgttttcctccttgtttgtagtatgggatcatctcctttttcatatggtacattttttcttttattttgacatttagtgtttcaatagtacctatctacagacatctgatttgctaggccttgcaccaacttttttctaatcataaaatcaagttttgaaatcagtttgagttttgaggaaaataaatttcttgtgcaggcctaacgatatcgcttatgtctattcgggatatgctcctcttagcattcgtcttatccaacaagctattcattctggatggttagtacgttcttgctttcttaattaccaaaaagaaaaaatgttcttgctttcttctagccaaaacttttgcctaggtagtttaacacataggcttttctgaataagtattaaactaagaagaaaaagtcgagaatctgttcagtttcaatttgagaagcacttacgtgaaagggctgataaaaactcagcataaggaatccatgtatgaatgaataggagaatttttgtctgcttcctttgaggcaagaaagaaatgcgcaaatagtaaacagcaacaactttactatgataaagcaatataacctaggttacgttcatgattgattagtgtgctgtattgatgtctcaatctaccttacaggcgtcctatggaagacattttgaagctgttaccaggaccccatctggagactaaaagagtcagtacactttttcctttacccaattagagagataaatgtaacctctcttttcaactatttttcaattgcaaatatatcactatgtcccttctttgtgcagagtggattcccaagtagtccatcagttgattcattgcacggagcttcaaatgggtaagtttctcgttaacaaattagttttgtaccgcgaagtaaattcgataaaatgataaatggaatgattctaatgtgtaagaggtttcatctgggacatgattacagggttgctgatggaagacgctcaattgttcttgttgtcttcattggaggtgtaacatttgctgaaatctctgctttacggtatctcgcctctaaggtatatatcaaacttcaaaagtttaccataaaaaaaacactctttttgtccgctgaatcctccattcttgcttctgcataaaattttatcaggaaggaatggcttatgatttgattgttgccacaacaaaaatcgtcaacggcgcaacgttgatagaaacattcatggaaaaactaggctgatccgtaaactgagcgttatgttcatcttttctctttcgagtgtgtttattaattcattttttgtatgtctttgtttatttttctggatcattgtggttgcagagtgaatggtatgcgtatgtgtatgtgtatattaaatggttgagatacagcgtgattatacaaattcaataatgttttcttggtacaacctttcacttcaacttctgctagttatatacggctttacttctccctaattctcaagcaaatcgagagtgtgaaacagtaaataatagggttacttttacttttaaatatcaaatagatatacacaactctgagtcgaaaattacatataacatcattacataagattcttatgtcagactcaaaccaaaggttcctatacatataatctacactgaaacaaataacattccaaaagagcgaggctttcatggaacagtagttactgcaacaccttcggtttgctgaataagctccaacaagctcgcagctttcctctttgctctatcagtgccattctcagtaagttccttcaaggccacatctgcaccaacctctcttgctacatttagcctttctatattcccaatacatagataccaaagtattgctgcagcattttcccggttccttggtgaccctgtccttataatctcaaccaaaaccgggatagattctgcttcagctatcgctgttttcccttcttggttagttgaaagaattgctaaaatggccagagcctcatccaccattccgccacctgcatctttcagtaatctggtcagagggtcaacaataccgcctttaaccgcccttgatttgttcccctggtatatgcataagttgaaaatcgctgtagcagcatcttttttgcctcttcgggttccttcctcaagcaagcttataagtgcttggatagctccagcagcacctattgccactttgttttcatctataacagataaactgaaaagggttgcagcagcgttctctctagcttccatgcttccgttctttaggacttctactatatccgttatggctcctgcatcaacaatggctcctttgttcccttcatttatggaaagattcagaagagctgtcacagaatgttcctgagtccgaggatctggtgaggatagaagctctacaaggagtggtatggctccagcctcagcgatacaaactctgttatccacgttcctcttggctagtaaccttaattctccagctgcagctctttgctgttctgtagtaccgttggccaatttctctaacaaggaaaggacaaatgttcgatcacaatctgaagagctgcttcctcctatttttgtggttctacagctcccttgattttgcggtagctcaatgccgttgctttcacaccacaaagcaatgagactctttaacacataattaggggttaatccagcatgtaaaagtgtctcctgagatttcggacatgttttatgaccagcatcaagccacttctgaattgatgatctttcatatgtctgcaaggtcgaaaaattcagctataacaacaaatacacaagtttaataatcaaattcactacaatgcacaacgaaacttgcaaagccagacctgtccagtggagacgataacaggatccttcatcagttcaagtgatatcggacaccgaaaatactctggtataacaggagaacgatgtctcgaaacgattctgctgccagtggatggatcagggtctgaactttccattgttacaaagtctaccaggtttttaagaagtgaagacatcctctcgaaacagtcatcaggatctccatcatatgaaagaaaatactcatgtatcgcatgcgattctttcttcagctcatcaatggtagtaagttggagctcttgtgaaagtcttttgaggattatagggtcaggatccatcacattctctgccatagctagatcatggctaagctgtagatcagactcctcccatctttcttttgctctcttgaactgaaaatgcagaagctgaacctacaaattcagagagcttatcattagaattcagattttaatcaacagaaaaatatagccctccttaaatcaatgcattgagaagtacctgttctctgacttcctctgatacctcaatcttctcataaggaatctgacttaacgctgcttctatctccactgtcatgtcacggaacttctccacaagagaatctctatcgaaaagctgccagcagagagaacacgaaaaaggtctcaacttcttgttatcagactcaatttgattcatcccaaaataagagaaacaagacaaaacccaaattcttgatattgttaaagaagacaaagacaaacaacaaaaccctaaacaccaaaatcttaaaccctcgaagagaaaacaaaggaaattgccaacttttgccagctaccaaagatataaatacaaataaaacagagcaagtaaatgagtaacctgaaaaagcttgcttcctccattaaccgatcgaaaaagctcaagacttgaatcaagagcgattctcatagcctcaaaccctgtaatctgatcctttttcaattcaacattgacgtcaatcaattcctcgaagaaagggctgagaagcgtgatcctacgaacaagatcgccttggatcttcccaataaaaccccttgaagatgaaaaccctgatatttctttaacggagtcaacgagtcgactcattagctcctcgtgggaacaacaattcgttaatcccatccctcagattttactgttccagagggcttcaaaagggttttaacgaaaccaagacgaggaagaagaaacccaaaaaaccaagaggaggaacagaaatgctatggaacgaaatagtcttctcatcaacgtgacaataaacacctatttggacatgaaaagtctcattttgtccattttcagaccaatcataattttttctattttattttgccgttaaattttaatatttaaacattgcatttagattttcatatttatttattgcctcaactataaatttatgatattaaggttgaccaatacaaatatataaagtttttaagtttgtatttgcatctgaaatcatcaaaagtcaaatcctttgtataatggatttctctacctgtttgttagtctctttgaaattgtcaaataatttcttgatttaggttttgttagaattggctgcaatagtctctcccacaaactatacatgcattgaatcatttgaatgaagctttactcttctctacttctgatgaatcccactaaaatatgtactgatgatccattgcttgatataacttgggtttccacttttgaggttcgtaatatccccagtttcaaactcaaatcttcacattatacaacacacttgacttaacagatagagaaatattgttttgaaacattacattaaaaagtatggaaagattagtagtctgaagacatggctgaagatgagatgattcaacactccaatcatgacgaaggagcaggacgaggtagcctcttgccaatttcctatcagacatgtgtacactacaacaagttaaaatctcatatacttcgtattaatccatctttctgcatccaaaactattatcctccacaaactacaagaaattaaatctcatatctagctgcatatcactgcctatcacttttccatcctccaattccaaagcaatgaaagaaacggataataagatctcaataaatgcagaggacaagaaaatcgatcataaatcagaggcaagaaagaagtgcacacctcaaacagttgatttatgttatcggctgtcttggctgacgtctcaatgaagaacatgccgttcttctctgcaagctccattccatcctgttaagaaattgaaaatgtgataccactgaagaagcaaggacaatgaaagtgacaacaaaatgcgctacggaatctagatgaagacgtttacgcaaactcacctcagtaggtacttctcttttttcatgtagatcagctttgttaccaaccagagccataacaatatctgggcttccatgcttttgcagttcctgttagatttatgggcaggggtaaaacaatagcactagattcaatataatgttgatatctttcctgcacggagttgtgccaaatggcttcatggtagcaacgagtgcaaattaatggaacaaaaatgtcagagaagtaaaccagttgcccaactaaatgatacccattatatacacagacaggagtgctgttggctatatgactgtctgtaactctaattttcagtcctggtaaagatatagctcggaagctattgcacgaatcctagaaacatgaacgaaatggaaccttttgaaccccctgaaaacataccttaacccaatactgtgctttcttgaacgattcagggcttgttatatcatacacaataacagcaactccagctccacggtagtatagtggtgcaagagcagaatacctaaaaataaagtgaatgcaggttaaatcctagtaagtttgcaaagcgtttatctaataaaataagcaatacaaatctgcatgaagggtttaatacctctcctgtcctgctgtatcccatatttcaaacttcactgtggtagagtcttgcaatgctatagtttgggacaagaacgaggctccaacagttacctgatacatagctagtagtcttgagatctagtggcagataagtatactctaatagtctaatattcactcacatcagagcatggtgttctaaaaaggtgtcagatggtcaataaagacaattagataacaaggctttacttaccttagatgtagcgtcaaactgaccacgtacaaatcgaaggacaatacaacttttaccaacaccagagtctcctaatagaactaactgcaatcaagtgaatccaaaagttagtggtatgtcttacgcaaagttgaaaccaattataccacacttggcaaaatactgctgagcaacaagaaaataaaaggtgaaagaaaaggaatcatctccttaacaatagaaaaagagtttcaaaagtagcttgcaaagcaaaaccgtcaattattaagaacaaagttgaggttttgctactaccattctataaagagtgtatgtttcttcaaaagcgcttcactaggcttatcacatcttacaacatgcgtggattaaaatgtgaacaatcatatataatgcaagaccacagatcacaaaagcatgaactttctaataagctattagaaattgcaggaatcagtgaagaaacaaagcaatctcaacgagatcaacattcttaaacgagactaaaaactaaaaaaaaaaaaccttcacacgtagatttttggcatcagctggaacagcattctctgaattgctaagaccacttaaagttccagagttcctatctgcttcacaaaacacacaaatcaccaacaatcaattcggtttctccaattctccaccagaaaaccctaaccaatcatcaaaatccccaatttttaaaagcttctaattcaaccccgatgattacaccttcggaaaatgggtggtgaaattgctcgagggtctctataaatcctcagttttattcgaacaacgacaacaaattcaacaaaattgagagagaaaacaaaacttgcctggaagagaagaagcacatcccatagcttacccctgaatagatgataattgacgagattatagaaattacagctgagaagagattgtatacaggatttgagcgttgatggtaacgagttgaagaagaagaagaagaagaagaagaagaagaagcaagatcgtcaaataaaaataaaaacttatcgatttgatgatttttatcgtccttttcctttgactttaccaaagttttattttaaaggctcttttttttttctcataagtgttgtctcttattttatgaaccctttaaccatttctcaaaatattttacatatggttattctcaatttccacaaagctatgaagtatgaacatatattattaacatatattatctcaataaatacagttttagttttaagttttaaccgtggtgaagagaaaaattctcatatttagcaaaaactgatttgtgttgattaatttactaaacaacatttttatataaaattacttttttcatctataataaaattgcttaaatattatacacaagtatacaaacacaattaattaaagaatacatacatgggttttattcaagaaataacccaagcatagagcaaaaaaaaaacaaataggtgatttagctatcaatctttgcacatacttaatttagcgggtaatattttaggggattattacttttatggattaggaatagctttctctgttgtagaacaaagagttgaatctaaaggaagattgttaatgtagcggctaggagctgagttgaagtgaaacccctttggaagacaatcgttcatcgctccaccgcgaaatgcgccttgttcgctaccttttatgtaaattgtattcgtgctcatgtgacccggattattggattccaataaaggtcttgatgcacagacaacgtttgttcgaggagaaataaggaacaaaaagagtaacatgaagaaggaaatgtagctcgacatttactgaagttagctatcaatctttgctctataatatcttgtattcttgtgaggaatatatgctctatttatatatgagtgggtgtgtttgcttgtgatcattgtattgaccaagttacgtatgtgtatccttgcgtggtgagctttgaaatagaacaactcacatagaacactttttcgatcatgctcgtgcttctcattacgccaaaccttctccaaattttgattttccaagtcataattccactattcaatttatttcaacatattcttttttagatgaaataggaaagatatgacataagaaaataagaaaactatttacatttaaagttgacaacaaaaatattacattaacaaatgaagacctgaaattagcttagagatggtttagtgcaatattacttgctaacagaacaataaaatttgtctgtgtgagggataaatactttagcttaatctaatacacttggaattggatacgtatataattaatagtaatagagtaaaattaaaaataatccgacgtggataatagaactacagatgggaagaagaatcttggcctgggagaatctaattgtacacctacttggatcctaaatgctgatctaaagttgaacgaagcaacagtcgacacgtgttaagttaaccctcatgcaattagatcttctctctggcgctacaactgcataatctgagatctaacaatgtataccaataagagaagaccatgtggataataatgacacgtcaacgattgtaatctcatgtctgatgttggtccgtttaccggttagatgagtgagttgtcctgctatgtgccaacgtgtcccaatgtctcgctgacaagcttttgatcgtagtgcttttgagatattttgctcgagaaaaaatctataagaaaatctatttcaaatttgcatccaaatgattgaaagtgcatgaccttaaaatcaaattttactaatgacaaattttcatagtaacgattcagtctacgtacaaccggaatccgttaagtcttacattcctcaggtttatactaacgacactataatacaaagaagtacttcatgatgagtaataataaaaatttagtgatcggtgtttgtttttgcatgtgtcaagcttcttatcttctattaacaggtaaacatgaaccatcatagatcatgcaagtgtgaattcatactctcaaacaattaagcacatgataaatctattcaaaaaataattcaaaataccatagggaaataagaaagcatgcatgtgagaataatttatatatagctggaagcggcgaatataaagagtaaatgtgggcatgttcttgagtcgtggtttcctgatgcggttgatgcattgccattctaacatagcaaaattccaaatgatcagaaaaacagatccacacaccatgtggacgtggttcttccctctccgatagagtttcctttcactaaattgttttcttttctttctttttaaccacatattaaatagaaatttattctttgattgcgctaccaatcaggaaaaataaattttaaatcaaaaattttataacttaaaaatctagaaattttggcaaactaattggcatagagattacaagagcgaaaaatatttgaaagcttaactcggaaaaaaatcaaattcatcgagaaagttggaaaaaacatgttatcaattctctggagatttcatcatggagactaactctatacaatcgatttcgaaaattttacagtttatctttttgagaaaatattcttcatagtccgtattcaaacttccgtctccgagtcaagaggtgagaaacctctcctatgacatttagtttcttaaaataacacatgtacattttcttgatgaacataaagcccttttttcttttctttttaacataaaagatttaaaatatgaatgtctaagtcttataagaagtcatgttttaaagtggatgtgaaaattgagttcatgtgtatactaaaaatatgaagctctactttatgtgtgaatcttttataagtacaagtttcttagtataactacctctagtgaaagaaacaaattataacaaaataaaaaatataatgtttttatttaatttttacttttcaaaacttaatagttaataatagtatataatgtttcatttcattattataataataagttatttgggaagaaatttggacattttatgtactaccatttctgctctttcatatagagaataaaatgataatttattgattattttttatgatatattttttgtaaaatttaaaactaatagatttattttaatacatatcaaaatctccattatttctcatattttcaattagtttataaaaggataatgaatcgattcattgtactatagttacaaacttgacctaaccatggttaactctggtatatatgaatgactcacgttttaacggctctttactcatctagttgtcctctgttttgccctttcactcccctagactcctactttctctgatacaattttttgtttgtttcttgtgtaatttaaagattctctataaccttaatagcattcataaaccggattggatccattgtgagagaatgaatcactccacttctgaccagagcctctacatcgagagtgatgatggagatgacgagagaaaacacttgtccgacgatgaagacgacgatggaactctttctgatacttctgacgcttacaatcaaaaccaacatcatctgtctaaagctagcccatactcaacggcatggcctaagagttataggtatcatgattctcaaatttctaacgttaatgttaatgcttctttgtcatttgtgtttacttaattactcatgttaatgtttcaggcaatcgattgatatgtttggaagtgtaccatcaccaaatttgggttttcttgctaattcttctatgtcgagaagaggaagctcattcatgtcttcgacactgacaagaagacatactccagaatcattaccttgtgttacaaagcctctcctagaagatgaagaagcaccaaaacataaacttagcactcattctttgcttccgtcgaaaccatcgtcatccatggtggtgtctcatgatatgggaatctccaatgatagctcctttggacaggctgttcttaatggtgagtttcatcacaactacttggtaatctctatgatggcactgtcaaactattttttcggtgtgatcacttgaagttagactaattaaataagagatctaatacatatgtaacaccaaaactattcttacattttgtccagcaaaaaaataaaacactttagtcctttttaaaacaaaagttattaactaagagacaatagtatcaaaacttgtgaataacagaaaaataactgacaagtctgctctgttcactgacactatgtaaaccttaactagttaaaattctctgagtgatgagatacatgtgcaggagtgaatgttttatgtggggttggaatattgtcaacaccatatgctgtgaaggaaggaggatggttgggacttatcattctctttgcatttggtattctttgtttttacaccggtttgcttctgcggtactgcctcgacagccaccccgatgtccagacctatcctgatattggccatgccgcttttggttccaccggccgcatcctggtctccgtaagtaaagaaaatctactcatctatacattgttaatttgagggttattatatatcacttgtgacaatattttacaattatctttcttttgattgcaggtaatactctatatggagttatatgtaagaacaacttgcaattcctccaataattttcgttatattatatagataaagacaaaatacatttttgaaagtttcaaaataagtacctaaaatgaatctcaagtcaaaacaatggaccacatgtggagtagacaacacctttgcccacggtccatattgtttccctctctcttgtttcataaatgaaatatttggtttttagtataagaaaatgttgaaattcatcaactacacattgaaatatttgtctagagagaaattctgaatgttcctatgatatggtaaagttacacaaagtttgatacaagttatggtaaagttacacaaagtttgacacaagttcattttgcatgcaggctatgagtgttgaatacataatattggaaggtgataatctttcatcaatgtttccaaatgctagtctaagtattggagggtttcacttagatgcgcctcgtctatttgctctgcttaccaccctcgctgttctcccaaccgtttggcttcgagatctcagcgtactaagttacatttcaggtataaaacattcaatctaaaaggaccttttaaagattcttttttcatatatgtgaatatcttaaccttgatcttgcagctggaggggtgattgcatcagtgttggtggttttgtgcttgttttgggttggtttggttgatgatgttggtattcacagcaaaggaactccactaaacctcgcaacattaccggtttctgtaggactctatggttattgttactcaggacatggtgttttccctaatatttacacttcaatggccaaaccatctcaattttctgctgttctcttggcatcgtaagcttaaatataaagacattacacatcttaggaactctctacatttctatcttttactgacagtatcaatttttatttttttttcacagttttggaatttgtactcttatgtatgcgggtgttgctgttatgggatatagcatgtttggagaatcaacagaatcacagtttactcttaacttgcctcaagatttggttgcatctaagattgctttgtggactacagtaagtttttttttttcacccttcctctgcttattacatgaaagttgggatgattttcactaaatttggtagctagccaggtgaggtcatctaagagtttttttccttgccttttttgcaggttgttaatccatttaccaaatatcctttatcaagaaatattcagagacttttcatttatctctgtaattttgtcataagcttattcataatataaactgaaaattgtgtggccttaatagaaagaaagcacatatgctttgacattatctccagttgcaatgagtcttgaggagttaataccatcaaactatgggaagtcacgtttctacgcaatcgccattagaagtgcattagccatctctactctgctcgttggtcttgcgattcccttcttcggtaaggacaaacgaaaaatatacatgtaaagaaaataagtgtcacttcttttgacactcagaattcttgcaggccttgtcatgtcactgattggatcattcttgacaatgctcattgtaagttacacatttgtttcatccttttctggttatgtaaagcaaattctcatattgcagtttcatagtgaatttgcttagcctgacaaagtttctggacacagacgctgatactaccgccagcttgtttcttgagcatcttaaggaaaaaagtaacccctactcaggtatggcctgctcacttactgataaccaaaccgaatatcgaaattcctcaaactgaaatcgatataacaatctgtggtttgtttgcaggtgacaatctgtatcttaattatgacagtaggagcagtatgttcagtcattggcacatattcagcccttgcaaagatcattgagaagttgaacacctaaaactgatcaatcttgagattcttattttgtttctcttgagattttgtttctgtcttaaatcaatggaacatctcaacctatatggaacattccaaacacataattgtattaaacatcttctgcatttaaatgttaccaaacagtgaactacaagaaacaattataatactggaacataaggtgaagttctgttccataatggttaagtagcaaaagcaaagaagatcactccttattcagtagaaatctttcctccagctaaatcttcaggagttaggttaagagaatccatggatcctttcttgaattcttccccttgagaagcaaggaagtcctccacgcttcctggttctccaaaccaaccacgacggtctgcaatcaaatgtagattatcacaccctccacatcgtaccaccacaacgccgttttcatatgattctcggctcgccatcttcatagatcttgtatcacagaccttgcaagtgaagaccatcatgaagtcatgcctcgggtttatttttaactgggacttgtacttcaccatcatttcctcagagggcgtcgcaggggagggaactttggccgattcagtagcagagtttgacgagttgcagacattggttacagaagcttcatttgcctcacggattacagataactgtctctgaaataatcttccataaacatgacttctgctgaagagtgagtttgatagcgacaactgctctgttgagactattttcaaaaaaaaaaagataatcaagaaagatcaatttaacagtagttgtagttgcacgaagctaaaacagtctgtaccataacaggacatcataggaacctcctaggataatgtttgcatcaaaccgtagactaatgctaacacatcttagtcaggaaatatataaccaaacttgaaaacttaaccagcgtctagctgaaatgccaatgttcacagctactgcttaatgcatagagatatgttgaagacaaagcacttatgtgagcattcataacttcaggtttcgtagaagcacttctctaactccaaaatgtaacagagcaaagacgatattagatgatatacacatgagaatacgagtactcatcatcactaatgccccaaatctctaaaagctacaaaaacaaccctaaaaccaaaatctccccaaaatcctcttctagtgtaaattcaaacataaaaaccacaaatttacatgaatctcaaccaaattcatcaaaagaaacatcaaggcaagtataaattacacagattaagagaccagtttaactctagtgcccgattttcaataactctttaatttttcttaaagatgacaaagttgagaaggagagagatgaaaccttgagacaaaggaaaacgatgttgttggttgctgaaaagagacaaagcgcgtctcaaagcaagtaacctagcggccattgacaacctgagggagaggaggaactcgacgcttctattttccgtgaaattttggaatcggagcacaataaaagaagcctttttaatcattagagttagttttcgttatggtcaagtcaaaatctaaacccaggttcgaaccactgagtgagccacaagtagaccgacctttttcttcttttttttacgtgaggaaaaagaaatttgtgaattgaaatcttatctagaaaagaaaaaagaaaaaaaaaatcagaacaagcaggagaataatgtgtgtgatacaggatattgagtaaggccacgtggacggctgtgattagaagatcaatggacggctgtgattcaaattaagtgtgcgtagagctgaagctaataaatatcaagtgtcatcgtattttcatgttatcgttgaagttgttgttattcctttctctctgaaaacattccgagattcatcctctgcatagaacgtcgattcttgcgaggtgaatccagaaatcccttgttttatgaacattggatttcatttgttatttacatcgtaataataagtaatcggagttgttgatgattgctttggttgattgattgtgttgtggtgtggttttactgtattaaaggtatcagagcaaagacgtttctcggagatggtgatcgagactcgagctcaggagttagctcaagctcgtcgagagaaggcgttagaagcagaggaatcgatggagtcacagatggagaagatcgagagcaagatcgatgctcaaaatctgaagatcgagcgccatatctcggagatgtttgaggcgatccacatgctgtctccatctaagcagtcaaatctgggtgagactcatcaaacagctcgtgcttcatccgcttcagcaacagacgtggattacatgagaaggcaaggtcacgctaacaatcattcgggagtaacaaggttagggaagttggattttcccagattcagtggtgagaaggttaaggaatggttgtttaaggttgatcaattttttgcggtggatcctatacctgaagagatgcgagtgtctgtagtttctattcatttggatggtctggctgctacttggcaccagaatatgattgaggatgaagtgcaggttcctgagtggggtgtgtacaaagctaggatcagggagaggtttgagatggttggagaggatcctattgctgagctgaagaagttgcaggaaacagctgctagcattgatgactatcacgcaaagtttgaggcgatccggactcgagtaaggatgacggaggattatttagtgagtgcgtatttggttgggttaaggattgagacacagatgcatatccgaatgtttcaaccccaaacggtgcggcagtgtttgatgttgggacgtctctatgaaactgctcatcctgtgcagaacaatgcgacttcttggaagaacaataaggctacttcaaagggccagttctcctttaagaaagacatggagcagcagggcaataaaccagcgtttcaggaaaaaccaagagacacacaacaaaatcagccaaggcggttcttatctactgaagagatgagtgctaggagagctaaaggattgtgttatttttgtgatgaacaatacacatctgaacattataagattcacaagaaaacacaattgtttgttttggaaatggaagatgctgaggaagtgttcttggatgcagaagaagagcataaggagttagttggggaagtagctcatatctcaactcatgctatggagggtatctcaacttacaacactatgcgagttaagggtacaagtcagaagagatccatttttatgttggttgattcgggttccactcacaattttatggatcctcaaatggcaaagaagttgggttgctcactcctacctagtgataatgcaagagtacgggtggctgatggttacaatctgaaggtgatagcgagaatacagaattttaagtgggagattcataacacgacttttgtagctgactttatggtaattcctttgaaaggaattgatgcagttttgggtgtacattggttgaaacctctaggtcctattacatgggatttcacattgttgacaatgcagtttaaatgggataagaaacgggtgatgatacatggtattcagccttcgtcggtgcgtgctatcaaggctgacaaattgaacaaactgagagactccgaagttcagctgtctatgttgtgtgttgcagacgctgatgaggatgagggagaggtgttgcagttgtcttctttaacaacagaggtgtcaccaccaagtactacttctgctatttctcaattacttgatgagtataaggatgtgtttgctgaacctaaagggctgcctccttctcggacacatcatgatcatccaattcctttgattgagggcactaatccggtgaacatgcgaccatatcgttatgctaatcatcaaaaagatgagattgataagattgtcaaagatatgttagagagcggtatcatccagcctagttcaagttcatttgcctcccctgtggttttagtgaagaagaaagacggctcttggagattgtgtgtggactaccgaaaggtgaatggaattacagtgaagaattgtttccctattcctcttattgaagatcttatggatgagttgggtggggcagtgatcttctcgaagtttgatctaagagcgggttatcatcaagtgagaatggtggagaaggatattcccaagactgctttcaagactcatagtggtcatttcgagtatttggtgatgccctttggattgaccaatgcactagctacttttcaagggttgatgaattcagtgtttcaaaagtttctaaggaagtttgtcttggtgttttttgatgatatccttatctatagcaaatcaaagaaggagcatttgcagcacttaaaactggtattggaagtaatgagggagcataaattatttgccaaacggagtaactgtgcgtttgcaacatcaagagtcgagtacttgggtcattttattgacagagacggactgtctaccgatccatcaaaagttttagctgtgaaggaatggcctgcacctactaatttgaagcaattacggggttttctgggcttggctaattattaccgccgttttgttaagaattttggagctattgccagaccattaaccttgctaacgaagaaggatgcatttttgtggtctcccgatgctactgtggcgttttagaatctgaaacatgcattgtgtacaaccccagtattagctttgccccgttttgatcaaccctttgtagttgaaacagatgtttgtggtcagggtatcagtgcctttttgatgcagaatggccatccactggcttatattagcaggcatttacaaggcaaacaacttcacctatcgatctatgagaaggagcttttggcagtggtctttgccattcagaaatggaggcactatttgttacatgaccattttgtgatcataacagatcaaagaagtttgaagtatttactggagcagcgtcttaatacacccattcagcagcagtggcttccaaaacttttggaatttgactatgagatccaatacaaggagggtaaggagaatttggtggccgacgcgttgtcacgggttgaaggttctgagattttgcatatggcattgtcagtattggagtgtgatctgcttcagaggctcaaagatgggtatgcttctgatgctgtggttcagaaacagattgaagctcttcagagaagtgcagattcgataaagaagatgagttggtcacaagggttgttgcaccgtaagaacaagctggttgtaccaaatgttgtagctttgaaagattctattttgggatggttacattgttcaggtgtggggggccactcaggtcgtgatgctacccatcagcgtgtgaagagtctgttttattggaaggggatgtctaaagatattcaagcttacatccggagctgttctgtgtgccagcagtgtaagtatgatactacagcatctccgggtttgcttcagccattacctattcctaatgcgatttggtctgacatatctatggattttattgatggtctgcctatttcttttgggaaatctgtgatcttggtggtggttgatcgtttaactaaagctgctcatttcattgcattgagtcatccttattctgccttgacagtagcacaagcattcatggataatatattcaagcttcatgggttgcctaattctattgtcagtgacagggattcagtgtttttaagtgagttttggagagaattgttcacattacagggtgtggctctcaattactcaagcgcatatcaccctcaaagtgatggacagacagaggtggtgaataggtgtttggagacatatttacgatgtatgactagtgacagaccgggtttgtggagcagatggttgcctctcgctgagttttggtacaatacaagctttcattcttcagctaacatgtcaccttatgaagctgtttatggtcaaccccctccgcagcatttgccttatgttccgggcgagtccaaagtggctgtggtggctcagaacttacaagagcgggagaagatgttattgattttgaagtttcatctcttacgagctcagcacaggatgttgcagtctgctaacaagaagagatctgatagaagctttcagattggtgactttgtctttgtgaaacttcagccccatcgtcaaggttctgtggtgatgagatcgaatcagaaactggcgcctaagtattatggaccttataagattctggatacatgtggaaaggtggcttacaaactagctctgcctgacatttctcgcattcatccagttttccatgtttctcaactgaagttgtgggtgggagagtcttcagttggtaagcaattgccttcggtgttgttggatgtgttgcttaaggaacctgcgcgtattctgaagaggaagctagtgaatcgccacggtcgtgcagctacaaaggttctggttcaatggacgaatgaggatgaggcggaggcaacttgggagttcttgtttgacctgttgcagaagtatcctacattcaaccatgaggtcatggttgcttaaggagggaggatttgatacaggatattgagtaaggccacgtggacggctgtgattagaagatcaatggacggttgtgattcaaatcaagtgtgcgtagagctgaagctaataaatatcaagtgtcatcgtcattttcatgttatcgttgaagttgttgttattcctttctctctgaaaacattccgagattcatcctctgcatagaacgtcgattcttgcgaggtgaatccagaaatcccttgttttatgaacattgggtttcatttgttatttacatcgtaataataagtaatcggagttgtagatgattgctttggttgattgattgtgttgtggtgtggttttactgtattagtgtgactacaaattaaatttattaaagcatatagacacattcaatatcttctttgcgtagaaattttggcaaacggatataattgtatatcgttgtagatgtcctgcacacttgcctccatcaatctgcaaatttcctaataaattccagtagttgggactcgaacctcatacatcttcatgtagaagcattaatgaactactgatcaattattgggccaaaagagcttccacacagtactttatagtttatacatatattctgcataataacaatttggttaaaaaagaaaagaaaagaaaaaagaaaaaaaaaaaaagaaattggttacaaaaattatctttcgtaatactggaaacgaaaagtaaaatgtgtatgatgatgatttcttgtatttcatatgaaagatgattaaaaatattattattaatgattttttaaaataatttttttatgttaagagacatgtcttataactaacaaaaatctcttatataaaagattttaaatcattttgttagttataaaatttttataaagatggtctaaaaccttacttttgaacatgatgctagtttgaaatctagagattagatttctccatagatttctgcgaaactaaacttattttcgtcatgatgtgtttcaaaaatgcgcatgaaacacaaaagttgtaaaagctttctttatgaagaggttgatggccactttatttgacctctcgatgagtcttttccatcaccgtccaatccactcactacactatgccaataacatcaaatgagattactttccaaactacaaggaaccacaacatagttcgattgaaacttggaaggtaatctgataatctcattgatgtggaaccacactattccactttcacatgtaaatttatactttcatgtgtaatttaaagaaatactcgggacttacgttgatcatatataaggaatatttagtactaataaatagagcaatcttaatagtcaaggagtagagacatagatttaatcatagaagtagcaattcaaagttggcccgcaagcgacacttcaaaatatctctcctcaccaaagctagaaattagatactagtactacacgtcacttggctccaaccgtctacacaagataaaattacaagcctctcttattatcttctctttttctctctttgatgtactcagggaagagcatatcaaagttaaacgtgaggctggctcctgaaagacccgagcgccttaatcgcaccagccctcaacacaaactgatggtagaaagctgcgatggctgcaccagcaaacggacccacccagaatatccactgtagtaattatagaaaacactaataaattgaaaaccttggtaatatcaaaaacgaagaagtaaaatatatgatatagtataacgtacatgatggtcccaagctttgtccttgttgtagatgattgcagctccgagacttcttgcagggttgataccagtgcccgtgattgggattgtagctaagtgaacgatgaacactgcaaatccaattggcaatggagccaataccttcaatcaccacaccatcaccaccaacaacaaaaaataatgaaatgttactaatcacgagacaaatagtacagtccagaataatattcatatagttatgtttgggagtagtatacgtggttacaaatggagttgggaccatgtccaaataaaggacatatgttatggagagagacatgaaagacaaaaaaaagtttaagatcatcgatgtcctttatgcattttattataatgacgaatctagaagctacagtcgcaatatatccgtgatatattgtacggtctattttattttttcttaattcgattctaaatatgaatttcgaatttaaattttgattttagtaaaaacaaaattgtcaacaagcatacaatttctacggctaaatctttatgataagtagagcgccgtataggacacgggtatgctactgtttccattaatgcgatgaatttctaaattatctaaccatgactaaacctctctctgttgtaacataatcatgtcacattcttttaaaataaataatcttaaggggaaaataataggcttacaggaacgtgagagtcacgcgcactcctcttgggatcagtggcagagaagacggtgtagactaagacgaatgtaccaatgatctcggctgcaacaccggtgccgatgctgtaaccgtcagagagaccatttgcgccaccaccgtagcgggtgaagtaagcagactggaaggccttgaccaaagccacaccacaaatggcaccgaggcactgagccaccatgtacatcactgctctcaccaacgtcactttccgagccaacaacagcccaaaagtcactgccggattaatatgcccacctgtttcattaaaatacgttgaaccaaaacatttatgtgagctttaacaccaaaccaaactacgtttgaattttattacaaatgagcgatgtaaaaagagaaagagagagatcagaccagagatgccggcggtgcagtagacgaggatgaagatcatgccaccaaaggcccatgcgataccaaggacgccaacgcctgtacactggtcaggattcagggctggatcggtctggctcttgtaaccgatgacagtcataatagtgacatagaggaaaaggagagtggctatgaactcagcgatgagagctctgtagaaagaccacttcccaagctcagtagcgtcgaatagaggttcaggtggtgggtcttgatagtctttcccggagaaagatctcttatcaccaaccacttccttcgtcattgtcttcttattcttcaccaaacttaagagtatgtgtctctgttatcttaagatatattcgaaagtgagagagagatatgagagaattgatgtggtaagatggtgagtcggtgaagggtatttatgggcagatgtgacgaggctttggactctgtttttactttaatttttgttggtttggttgttgttgttgttgttgttaatgatcattttacatgggttttttttaaggttttggaatgatggcaaccgactacggtgattaattttctgtagaatgactgatttaattcattatttatgttttagtgtcttgtggagcggagaaacaatgttttcgctaatgcttaaattttttgaatttatttgctcgtaaaatacatgtgtcatacattaagttaaacaaatatttgacgggaattattagtgtggtcgcaatattcaagctatccattcattacaatcatgggctcaaagccgactctttgacaatggggttaaaaaatgttgtaaaggagaaaataagatagcaaagggccggcttgagaatccaaaataataattcgacgtataacatgtattcatcattgctcattatgaaaaccgaataaggttttgagttcttgaaaatttagcgattcataaggaatttttttcattgatttataattattttataaaagtaatataacatttgttggttacatgtatttaatccattatctgtagctctgttggtattactactataagaccttccaaaaaagcacgtaaactagttgttttgttctgatcccgagacatggaagagtatggacaaagacaaaatctaggtaaatatattttgtaagttttaacataagaatctcataataggtggatagtagagtcggcactcaacaaacgaaatatgaatacagtgagatgagaggccacaaaattttactactttcattttcagcgactcactttagagtttggatttggatttatcaatagaaggtatatgttatttattgatagttgcacaacaaaaggaactagtaccaaaccctaaataatacagagttttccaattagctgtttccaaaaaagttgtgtactctataaataggtggaccaagtatttgagagcttcatgccgactatttagttgatatatatagataaaaaggagcttctagaatcttaaatattgggtattcattcaaattagcatgccctcttccacttttcaacttttagaatcttggtatagaccactgtaacatttactgttttcattgttgatcactggtttgaagtgacaaacaaaggaaaaccagttcttaatctcggaaattacataaattttggctaaatgtcttctctgaatagaagaagatgaatatgacaacacaaaagtgatggtaaataacgaagaaagtgcacatgttcaaaactagggaggatggcagtggggtaaaggttggttgttgttctctttcaccgactcaacttgactttgcagctttgccttgttctgtttttgtttctaatgtttttcttcttgccaacaaaatgtcctttattttaactttgaacattattgtagtcatttttttccctacattaatattttgcactattaactttaactttcttaatagtgatcttctgttttttttgccgtccactctcgtcagcaccaaaactaacttagtgctttgtttatttcttttgaattgttaaaaccaatttgctcctaatttatcaatcagtgtgtgtgataatctgttaatttattcctcttttactaagtagttgatttaaaaaagggtttttgatctgttgccgtgaatgtccagttgcccactttatgtttcacatttttcctttttacgttaaaatgttaatcggaaatgtaaatccaactttcccctctttgattttggattatccaaataattctttttgtaaagtaattaaataaactttggtagtttgtcattgtagcaaataagttgattccaaagcataaaaattgtataccactggatctctgtggcgtgtctttcttatacctttagtatgccaaacagcaatggtctaaacataaattaggaaaattgtaatgatgtgacaaaaaaataatatttttactactttatcttttattttaattattacaagatattgttttgtaacagtactatgtagtaatgttttacctccaccgctccacgaccactttagttacacaattttttcctcgcgatcaagtttaggttttttctcgtgcagtggtggtctattctgataccaataggcaggcaatagggttgttaggagaatgaggaatacaaagaaaatgtataaacaaaaactagagcatagacaaaacagtaaagaagaacattacgtgggctgatactgggcctagtagtatttaacccagcccctgacaaccaagacaaaagtgttgggtcttgattcccgagtgatgatttgtgtcaattgtattgagtgaaagtgacaaggagaagagaaggtatgatcaagcaaacaactcaagggtttgattgattttctaagacaggtaaattcggcaaagtagttgaattcgtctcacttttttcatgagttaggggagtctcggattttgacatatgtaagtctactttgaactcaaaaaaagataaaaaaaaaagatatgtctatcataaatatatcttatgtgttaggccaagacccaactcgaccagtgaacatatccagtaagaaaatgacataattaaaagacaaaagagaaagaaagaaaaaattgttcggtgaaatcatcaaaatcgtgaatgaagtaagatatgttgtccaatcgagttggttattagtgcatcgacgaatacgaaaatatcattgttttatctgacgactcttaagtcctctttatggtttgaaaataacaacatggctacatgaggacgaaagttaaatactaaaatcattcgttcatattgttttatcattgttcagcaaatttaatatgctgaaaaaattagtttcaataattatgaaagaaaaagaaaatgagtgagttttgaaagaaaggtagttaaattaagaaacactcttactttaaattggcatcatagatgggtggatttacataaaagctagtttgtgaagtccttgttagaaaaagatatagtggttgttactctatctctcatctccatttaattttacattattgcttgtatcataaaacactgatttaaactcgccactaactctaacttaaccataaaaactttcataaactagaaacctttttaatctattttagacttgaatcagccagtaatattactatgtcatgttagacatgtatttagcttgtcggcaaaacaaaaacaaaaatgtaattagcaatgtctagtttcaatggtaagaaaaccatttaataattaacaatttataacattggattttaacaaaaacaaaaaaaaagaatcctttagctaaacaaatcaactacaaaaaaaaaaagaaaaaaaaagagaatcctcacaataaaaatacaaagaattgaaagaacaaaagaagaagaggaagatttaatgtaatactcaacacctaatgattctctaatgtcttcaaaatcttctgctcttcctcaacttacttttcctctgtttcaagagttttttgcccattcacactacaaatacaaaataatacaaacacaatcaattctcatctaacttttaatccctccaattgattgctctcttccttcatctcttctaaagctaaaaacttttcttctcactgactctttcctactcctggcatatctaatcacttcaacgcatggaaatcgaatcatcttctctatgttttagtctacgccaatgtaggcattgttcggaatcagcccttgcagatcattctcttcggttatgtagctaccatcactgcatctcttgtttctcatttcagccactttcttgtgtgagtttgagtgaagagctggagtaaatgttggactagcagctggacggtactccgggaaaagcctccctgatttgtaacgtacaccgcacgcattgcaaagtgtctttggacccattggaccaagcctccactgtggagtcttggtgacctcacagtgcatacatttcctaagcggatattgctctgaagaatacgaatcgacgttgtttccattgacttcaagatcaatcccggacgaagaagaggaagaagtaatcttggccttcttcttcttcttcttgttgatcatcttgttgtgatcagagagaaactgtttcggtattctaatgatgaggcgcgagtcaccaccgcacacattgtctttgactctatctttatcctggacaggtggacgagggcgttttgtgcgtggacgaccgtgctttccagggagaacaagggaggttgtgttggtggtttgagacgaggaggagctgctctcgagaaccgacactggacttgagctcctgaattggctatgagaagatgatgaatcagtgtttgtcgaaaacgaatcttccttcttctcaaccaatgtttcctctacaaagcttggaggtctttccaccttaacaatgtcctcaaactgcaatttcaccccaatcaaagaaacattgttagatagggaaacaattaagcgccaaaaaaaaaagacttcatttaactataaaaacagaaactttgtgatatggtaacaaaggcaaaaacagaacaaagcagagtgcgtaagttagcataaaactaaccaaacaatgtaagacaaataatgagcgggaaaaaaacaaacttgacttaactaaaagccacccataatgacaaaatttcatttattattactcacgaaacttgtggtttaatgtttgaaatcatacgttacgaagagggcgtagaactaaccggaacatagagctcaggtgatgaatcagagttggtgttggaagagaagagaggatcagaagcggcaggccacgtgtcgtgatgagtggtccagatggtagggaaagagtcggagtcacctatgccgaaaccgacatcgatatctccaccgggaaagtccatgagatcatccatgttgtcaaagaagttgccacaatcaagatcctcggggaagcttgttccaatcatgttttacaattattgcaagtctctctagctggaataaataatgagagatggggttaatgatattatagaggaaaatgacaagagtttgaacagaggaagtttctgaataagttttgaaaattttgaaccaaattttggaaccaccttaaaaatcaaaattttgaaaaataaacattctttggcccaccttttttgatttttttttttttttttgataagtaaataaagaggaccattctatgtacaaattcaaatcacagtagactataaggttataaaagtcaaaagtcaccgttaattaagcattcttgattttatctatcaatcttctagaattcttgtgtgaaaaccaagaagaaaacacaaatttttcagttacaaaaaaaaaaagagtgttaaaacaaaactgaattc

SEQ ID NO: 500 - DNA, 94378 bp, Arabidopsis thaliana
gaattctttttccataagtgtgttcgttgagcttgaagattagtctataaatgacgagaatgaccttaggaagtgtgctagctgtaatatgccattaaggttttgggtttaggggacagattttggtggaaagatcaagatcaaagtgtgttttggggtccatcttttgatgataagtgggaaaaaagttgcaatctttctatggaaggtgaggaaggggtagtatcgtctctaacaagttcggtatctatcaaggaaaaatagaaaatgactcttagaaggacgattaaagcaaatgatcctttacaaaaattgatatgctttgagtcccacatacctaattagttggaaacatgatgtgacactcccccagacagctaattaatcatccctgatgttagaagttagcagcaattattggtgtgatagagatgatgatatggaacatcagtgtttgtttaaaatttggattctataggtgagctgtgaggacttgattgattgttcctttagcccccctagggtatactgattacttgtgattgtagtagataccatttattataatagctttagattagcacgtcattctcttgctgcttttttcactgtgtattttggaatcttggtattttctcgttgaaatattggatcatcttaacaatagttagctgtctagaaagaatttttggtatgtgaaagcagatctacctaatatgaatccgagcttatcagaaagtctttgacctgcagattcaaggtaccgcgctggtgctggatgaaatcattaaccatgtccagtcattacaacgtcaagtggaggtgagactttccgtggtccaatttttgttctttatacctatattttacaatagccctgggcacaataaaagggtcaactcaaaacaatttgaaaatgaatagaattatgtgccgcaatctcatgaaactgtgacttgtgtttccacagatgctatcaatgagacttgctgcggtaaaccccagaatcgacttcaatctcgacaccatattggcttcagaagtaagtatcaaaatctcaaacaataatttggtcattctgattagtcttctctaggaaaaatttaaccatttcatgtgtttctcatttaagttaaccatacctctttgagtagcttctagtttctatcacaaaaggagaaacttttggggtatttattgatacaaacattaatttagaccattttagtgtaaggcataggaagatcacaacgtctactctcatgaaggaaactcagggaaaaataaatacacaacacacacacacacccaatgcaaataacagtagtgggtcaaaactcggaccacctttgttctgtaaaacctttctgtgtcttctgtgacttatgtcggatgtgttacttgatgaaccttttaaaaaaaaagttaattcatccctcaataatttctgtgggtctcttccaaaatcttgttatttcaaagtgacctatctaatttcatgatcacctgtggattctcatcaaaagttttggaccaaactaaataaatgctccctctctctttcttcttacagcttgtaccaccattaaatagccagggaccctctcatcaaaccttgttcttttaggataataataacacagcaacaacagttgacttctttgactagatcaagatctctatgaatgatccctttgctgatatcttttccggttttggctctgtgtttttttctttgacagaacggttctttaatggatgggagcttcaatgccgcaccaatgcagcttgcttggcctcagcaagccattgagaccgaacagtcctttcatcaccggcaactgcaacaaccaccaacacaacaatggccttttgacggcttgaaccagccggtatggggaagagaagaggatcaagctcatggcaatgataacagcaatttgatggcagtttctgaaaatgtaatggtggcttctgctaatttgcacccaaatcaggtcaaaatggagctgtaagttgggaaaacggtagagatcatgaatgtgtatatacatcgtataagctcgtttctctctatataaatataatcataaatatagatatctgttaagaaggtatcagtcatttgattcagagagacaacactggtatgattgtttcttattcttgtaccagatttcgacaatgtagaatttagtaggatatgatcattttgatctcgttatatatatcttactaataataaatagagataaaaaaattctatttagggaaataaatcagtatcgataaacaaaaacagaaagaagaagcaggggcatcctttggatattggagttgcacgaaaaagaagaagcaaaaacaaaatgcaactatatgtttagattgtttgagctggaccaagtgaaaatgcacctcttgaattatggtttaggttaggtaacaaaaaaccctaaattgactcattcgataagaacagagatgcaatcataaatatgagtgcaaagcacgttaccggaagctgtgatggccttgtttgcgtctaccgtatagaaagattgatgtgtatcatcaatcccgccactagatggtatcgatctcttcctcagcctaagattcaacaaattaaccgccttagacgaaatctacacgagagaaagtttcactttttaattcttttgcttaatcaatttgcttaatcaatttgctcatatatgtttacttaaatttttgatgtttttgtagtattatttcactattattgtgcctaattaattgtttttgtttttacaaactctctcatagcttattattctgcatcaaactatccaggattcggtaaagacactacgatcctcatagaagagatctggaattctagtttcagttgtttatcaattccaataaagtctacacacatagacataggataagattattattaagacctttaaaaaaaaatgatgggaagcatattattgttactattattcttttctctggtccaatcacgttcagacacgtcatattcaaaaattcaacttcccggcgattctctgaccctctccgttaccgatttcggtgctaccggcgatggtatcaactacgatacttctgcgattcagtcaaccattgacgcctgcaatcgtcactacacatctttttcttccatctgccgcgtcgttttcccttccggcaactatttgaccgctaagctccatctccgatctggcgtcattctcgatgtgacggagaacgccgtgcttctcggtggaccgagaatcgaggattattatccggcggagacttcgtcggattggtacgtggtggtggcgaataacgctacggatgttggaatcactggcggaggagcgattgatggccaaggatcgaagttcgtggtcagattcgacgagaagaagaacgtgatggtgagctggaaccaaaccggagcttgcttgggtgatgagtgtagacccaggcttgttggattcgttgattctataaacgttgagatctggaacatcacactacgagagcctgcgtattggtggttagttttgaaacttctgcttttcacaaagaactctatgaacaaatttgactttgtttcactatcttagatcgaagataaagtaactctagctgagaatttaggcttctgtgctaagtaatctctgatttgattatatacacactctcattgcagtttgcacattgtgagatgtgagaacacatcagtccatgatgtatcgatccttggggacttcaatactccaaataacgatggaatcgacattgaagattccaacaacactgttataactcggtgtcatatcgatactggagatgatgcaatctgtcccaagacttacactggtccactttacaacttaaccgctacagactgttggatccggaccaaatcctcagccattaaactcggtagtgcgagctggtttgatttcaaaggtcttgtctttgataacatcactatttttgaatctcacagaggacttggcatgcaaatacgcgatggaggtaaacaagtttcttcttttctttggctgcatacaacacagaaacttatgtaatgtaacccgaatatgtgcaggaaatgtgagtgacgttacattttcaaacataaacattagtacaagatactacgatccttcttggtggggaagagcagaaccaatctatataacaacttgccctcgtgactcatctgcaaaggaaggctcaatctcgaatctcctattcgtaaacataacaatcgattccgaaaacggagtctttttatcaggttcaccaaacggactactctcagatataaagttcaagaacatgaaccttactttcagaagatggagtaattacagtgcagggcttgtggactatagacctggatgtcaaggtctagtgaaccatagagccacgtctggaatcattatggagcatgtgaacgggtttcgcgttgagaatgttgacctgaaatggtcagatgatgatgatgtgaatgctgcttggaatgttcctctcgaatttagaccttccactgtgaataatgtctcgtttgttggtttcacttctggtctttacacgaaattgtttgagtctgattacgttatggttggtgaaaacaacattgcttttgcttagtaaagagattttggattcttatatttctttgtgagagaattggaaatttggtttttgttttctccaaaatgactacgttgtgaattgtgtgagcacgagttctccaacgacaccgttttcaacaagtaattgtaggttttctcacactagagtttatttacgtctaatcatcaatatatcactgagagtgaaatcggaatcacaaaaatggcgtcgacgaagccattgattgtcgcagcgaagacgctccgaaaccggatccacttccgatctggatccacatctactggtccaagccggtgggcgacaccgggtcacgaagaacgacccaaaggatatttcatgaaccggactccgccgcctccaggacagtcgcgcaagtgggaagattgggagcttccatgttacatcacaagcttcctcacgattgtaatcctcggagtgggtctcaatgccaaacctgatctttcaatcgagacctgggctcaccagaaagctcttgagcgcctcgagatggagaagcttgcatctgccggagattcatctggttaatcccaaaacttgggagatatgattcaatggttgatctggtatgtatgtgttttgtttgtttttccggggatttgaggagattttcccatttatgatgatgatcacgaatactagtgacctagggtttcgttttgttcctcctctcctcttcgttagtgtcgataaatatgttcatgaaataagcgatctttaactcttgacgatggttttatgtaactcaccttaatttttgatcatgtttcaaagctctcttgcctccaatcctttgcttataacttctcatatttggttacttttttaatattcttggagaaagtgatgaaaagtttattgcttttgctgacattgtatgattcatttgcttagaggggtctggtttgtttctgttcgttatcttatgactctgtgtggtacagtcccaacttcacattagtaatagtcagaagttataagtatagttctggttgggaaaagtttctctcttttgttttctagatataaaaatgtcgagacggttcattaccatagcttaagattctaggttctagcactatatacagtcatggagttaggtaatgaacactagattcctgtttgttttgtttccaaacatattggggggatagaatgattgcttgagtgtgcttcccagtttataaccattatgttagtggctgcgtgtgccgaattgcaagccactgtactaataccaagtgaaagaacatgagagtgtttgatatcggttttcggggaggaggttttgatgaagtacttggatatgtcgagggagagggaggtgcaaacataattacactcaagtaggtagatgaagttttagagtaacagtatacttcatgtcgctgcaggttctgatgaatagatttaggaataggtactgtcactttgaagattattacttgtctgatattttcattagccttcattgttgccttgtgaatcttctaggtaaccctaggttctgtgttggatccctaaatcttttcatctcattttggttgtttggattcttactctgtttcaatatctcccaagagtatgattctaaaatccttttcttcttttatacattgggatgtccaaaccgaacaaacaacgaaaaacgattgtagaaccggaaaatctaaaccgaaaccgagatttgatatccataccacacttgcatgatttgaccaaattggctcaactgaaaaagtgagtctcggtttacttgaatgtttgttggctgtttttgaatagtgaacggtaaaactggcgggtgtacttattgcttgctgccacctgcattgatatttcttaaatcgtatgcatctacatactacaggttccaaaatcacattaagtgcttcttgtcgtttcatattatatgtttataagatatcaaactagcaaaacttttgctttgattattttctagctgtatcttataataaagtttaatattatctcttgtgatctaccatccttagcttggccacacactctctgttcccttgtccacaatcgtaaactcaataatttcattttaaataaacgacaacagcttgttcacatataaaataacaaccatctcaaaataaaatcaagagttctgcttctctatccagttttattactaatttactactgcacaacatcatatatagccattgcaaaaaaatgttgcttctgcctttcacattttgttgtgtagaagcaagatcatagttactgtttagtgtttacaagtggggaaggcaaataagatctgaaggactaaagtgaaagtgacaatacggtcatcattactctgacctaaagtaaacgagtacaatgtgactggcgactcccggtaaacacttgaaccaccgacaaaaacttcccggtttatatgtaacggcatcattcacaacgaccgatcttcacggtccgtaccgtacacgatccatgtctgtagaaggagaaataaagtactagctttttacggttttcagaataaagaaaaaactcatttgctgaacaaaaaacggatttcttggtgatcccaaagtggaagaaagctctgtttcttcatccagattctcagtcactcgtaaattttcatttttttttttccttttttaatatctttcctctatttttcaaatatagaagatcaaaaatcattcttgtgaatgcactaatatctaatagcaactttgggaaattgtgagaatcttactgattgcttatgtggggacttgccgtttttagtattaaaaatgtaaatcattttttttccttttcatgtagattgaaacgaaccataacaagtgtcaataatgttgtcgttttccttatttcatatcctaatttgccttggatttcaggaatatacgcaactgagtttttgtcattttcttctgtttcagactattgatcacagctgttctttttttcaggcttttcttgaaagttgttaagtaactgttgctttggctgcaatggaggaaaactgaaaagagtttgatgatgaagggaagaacaaccaacaacagtgtacagtcgaatcgctctacgaagaatgggaaaagagatcaaaagccacagaagacaaatggtgctaaacgatcttcagagcaagaaagactcaaagctactaaggaggaatctaatgtctcagtagtagtagatgatacaactacacaatcaaagctctctgatgatgatgatcatgcagtgaatgactcttcagagaaaactgagaaggaagagactataaatggcttggcttgtgatgatgaagatgaggaggagaaggaagaaagcaaagaattagatgctatagctcacgagaagacagattctgtatcttctcctgaaacttgcgaaggtgtcaatgttgataaggtagtcgaagtttgggatgatgcttcgaatggtggtctaagcggtggaagtgagaacgaggcaggtgatgtcaaagagaaaaatgagaattttgaggaggatgaagaaatgttgaagcaaatggttgagactttggagacaagagttgagaaacttgaagaagagctaagagaagttgcagcgctcgagatttcgctctattcggttgtaccagaccactctagctcagctcacaagcttcacacacctgctcgaagaatttcaagaatctatattcatgcttgtaaacattggagtcaaggaaaacgagcaactgtcgctagaaactctgtgtctggtctcattttagctgctaaatcttgcggaaatgatgtttcaaggtaacaaaaacacagtttaacattgtgcgtgtagtagcctttaagatcttgatcttctcagctttttcttggttccttatgtttcaggttgaccttctggttatcgaacatcatttctctcagagagatcattttgcaggcttttggtaaaactagtgttcctagtcatttcacagagacctctgcatcaaatgggagtgaacataatgttttagggaaggtaagaaggaagaagaaccaatggactaagcagtcaaatggttttaagcaggttttcgaagattggcaggaatcacaaaccttcactgctgcattagagaaagtcgaattctggattttctctagaattgttgaatctgtttggtggcaggtaaaattttaagaaagactttttctttcattgaaattttaagaaaatattcattctttaagacatctcaaaatttgttcatgttctcttctgtctctcaggttttcactcctcacatgcaatcaccggaaaatggcggtaaaacaaaggagcatatcttgggagatattgagcaaggaagcttttcaatcagcctatggaaaaacgctttcaaagttacactatcgcggctctgtcctatgcgaggagcgcggcacgagtgcggttgcttacctatcttggctaaaatggtattcagattctacattttaaagctaaagccaatagcttaaagtatgtaaaagctattgaaatcttaaattttatatatacattctctccatactacgtaacaggtaatggagaagtgtatagctcgaattgacgtagccatgttcaacgcaattctgcgtgagtcagagcatcagattcccacggatcctgtctctgatcctatccttgattccaaagttctgcctatcctttctggaaacttaagctttggatccggtgcacagcttaaaaacgcggtacaacattaagaaacataatcagattgttatattcacttaacatgagaaagtactaatgtttttgaatgttgtgatctctcgcttgtagattgggaattggtctagatgccttgcagaaatgttctccataaacactagagattcagttgaagaaaatgatccaatagaaagtgagaaatctttcagtttgctaaacgaactcagtgatctacttatgcttccaaaagacatgcttatggaccgatccactagagaagaggttttgttatctttcattatcacgctttaagttcttgattaaactttcttgaccacagagcctttattcttggttgatttataggtatgtccatcgataagtcttgcgttgatcaaaagaatactctgcaactttacacctgatgagttttgtcctgatgatgtccctggagctgtcctagaagagcttaataacgaggtaaaagctctaaatccttcattcatctgtactctgcttagctctcactatactttttttttggtttgtttcttcatcagagcatttcagagcagaagttatcaggagttagcttcccttacgcagcttctcctgtttcgtacactcctccatcatcaaccaatgttgcagaggtaggagacatctctagaatgtcgaggaatgtgtctatgatacaaagaaaaggatacacaagcgatgacgagctggaggaactggattctcctcttacatccatcattgaaaacgtatcgctgtcaccaatttccgcacagggcaggaatgtgaagcaggaagctgagaaaatagggccaggggtgacaatttcaagatatgagcttcttagggaagtgtggtctatgtgagtgattggaagtcaaatgttgagctttttaaggaagccctttgttaccatctactactgaaacaaaataagttttgtccaagttttatgtagccgtaagtatttgatcaaatgaatatgctcctagaggattgtatttaacaattagctatctttatttctggacatttcttatgtttctttgttgtttttcctcctcaataaaccatcaaagatactaattacagtcttctggccactcttagtggcagacgaaaggtgttctcttggaatttgaatctagaatgtgaaattgagaccaagaagaggatataactaactacaaacagaatctgagcacaaatcacgttgaggtcggtaagtctctatcattcaagtccaaaacaaccaaaatataagataagtaaatctgtgattctttctgtagtaaatctttgacattatctatctctcttcgtggtaaatctgtagtagaaaaaataggtacttctcgttaaacttttgcttgtctctgggcaaaaatatgattggtaatgttttagcctgaagccacaatggcattggatggctttgaattatggttacgaaaaaatcttcaattaaattgcgtcatgtgaatctcatctgcgagctacggtttgatggataatttgcagatttctcaatcagcatgatgctatgtttataaatcatgttatcagaaacgtcctcctgactcctgtttacgttatttcaatgtttatgtccattgggttttgttagttaaatattgcagctggaagcgtgtgctttttctatcacttagatgctgtgagaagaaagatgaagatatgccaaagatgatcgaagtagcttaaagaactcaagtggattcagacatcagttagagattctctgttctgatatagtctctatgaaagttttattacatttgcttagattatgtgtagcttaagtaaacaatccttgcattatgaatgatgaaactcagaatcttacatacaacataaatagtaaagaagctaaaaaacgagaagatcataacaagtttttactactaagaatacataataatagatagatgatagatctgatcagtctcaccaggtttgcggtcaggtctgtttttgtatccgcttgagttcttttgcaacatctatcatatgaagcttggtttctcctgatctgaatccaacacatctcaatgcaagattaacaaatgcttccatttgcagttttgaatgatcaggaatgtcgtcatcggtactgtttaacatcgatgggtctatcagtttagctaacggtcctcgccccaaacacttctcaacataatcaggcaacagaatcatgttataactgtcaccattagccggttcttgatagaatccatgttttcctgtcaaaagacttagcatgatgaatccaaaactatagatgtcaacattctcagtgacaaaacctgttaccatatagtggggctctccaaagccttgtgtcccgcaaacgatatcttctacccccaactctccctctggaattggtatgctgaggctgaaagaagagagcttagcggtccaattctcgtccaagaaaatatttgtaagctttaaatccctatggattatagtcctagggaattcagtatgcagatacgttacagcatctgcaatctccttagcgatcttcaatcttacactccaagccaatggcttgattacctcccccgcacctcctatataggcaagagctcccttttctgggtattcacacacgagaaccggacgaggaaactctagacaacaccccaagagcttgagaacattcttatggctgctcatcatcgatgaaaccgcaatatcacggtaaaagttgtcagggtcaaagttaaagggttcacctttatagtacttgatcagcacggctctgttttcaatcgtacctttgtaccacacgaatctgtctacaccgattgcatagctccagtcgaagttgtttgtagcttcaaggatttggtgagaagaaaacgtacggatgggattgtatttacctcctgacgatgcaatgagtaaagtcccacatcgacaagttagagagccgtggtcataagcattgtagtataaataagaagctccgcccatcgtccaaatcatacctttctcggccttttggctaagatcaagtgtagtatctgttcttatcagtttaatatctgatatgtgggccatcggcccacacgatattaactctattttttaagggagaaagcccactaagatagcttgctatctgggctttcacgagtcgcccatgcgttgcactactgcacgggcctggctcaacccgccaagcaaataagtcaaaactttttaaaccttactctttatctttcaagtccaaaagctcagaggataaaagtgaatggagaaaaactctgttaaataacgttttctgtaattatctatcttcctgtagaaaatcagagatatttatatatgttacgcaggtattagaagttaaattatgtaacagaagcaaatctgtgaacattttgctttttctattgggaaaaatctgaatgttaatgtttcagactgaagctactataataacattcctggtttaatgtttgactacaaaaagaatcctgtcatatggagctcatctgtgatctgttgtttgatggataatatgcagatttctcaatcagcctgagctctttcgtcacttgaatcatgctactcaacgggtctcccaacttgcatccaatgcatctcaacgctaatctaagaaaggctttaattggccaagcagctacctcgctcatatctgaatctacaacctctgcatacccaaacttcctcagtatcttagaaacatgatggtgaagcgggaagtgaacatagcgaacatcatcataaggtttgatgaacaagtcagctaatgctctcagcatatccgaagatagagatagctcatcatcaacttcccttatctgcacaagagctagcatgaatcctccaaagctgtgcatatcagtctttgtcgtgactttaccggttgatttgtagtcgggatcaatgaccggtaagttacatacaccaagcccatgtgtcccctttaatgtattatgcctcaactcatggtatttctgtaatgtatcatcatgaacaaatgtctctccttctggaattgtgatacagttgcagaaattcccgagctttgcgaccccatttccatctaagaaaatggtgaaaggatctagattcgaatggatgaaaactcttgagaatgctgtgtgaaggtaagtcaaagcatttgcgacctctcttgctatctttatcctcctcagatatcccggatgagatgtaagcaatggaccaagagttataacctctgcatactcaaaaactaagacaggaggagtgaactcaagacaacatcccaatagtttgaggaagttcttatgaccactaaccatcgatgagatagctatgtcgcgacaaatctctttcatatcaagtgtgtatttccctttcttgatgagcactggccggtcatcaagcatgcctttatagcaacggtaataaacatcaatccgagaagcacggttactttggcagaagttatttgttgctttgatgatctggtcgtaagagaagttcttgataggattgcattttccatcacaacattcaatgagctcttttagaacaacctcgccattctctttgacattcctcttccttttcttggctctgattctttttgttctcaaccaatccatcgtaaagactctctacaagatttatccttaagagcaccagatttaatgtgtgtaaactcctcagaggaactccattaatccactctcaacagctgaaataaagagagaatatttcaaatcattggtactgcaatggagaaaagtagattagatctctagcaaataaaaacaatcccactttctcgatctctattctccacagaacaagactggaacttagaaatatttaacagcagttgataagttttgtcacaatcaatgaaagctaatgaacaccaaaatggaaagaaagatatgaagacaagaaatggaatccaacctctaataatgtctacgaaattgaactcagaattgaaattgtacctcagaagcgaaaacaccatgaatgctgcagaataagagaaggaaggaagccatatcaaaattgaatatagtttactctaaaaagtgggtatggtccactaaccaaagcgagtaatgtagtcggctaaagaaatgtgttgactttgaggagcaccaacatgagactaaatgtgttcacactggaggcaaagttactatctatttggcttatccactatccgagaacgaaatcaatcaagaaaatgatctcaatatttgacatctgagttcttgatagaaaaatacaaagacaggtagcagcaagaactcaaacacattgagacatcatcactaaaaaattcacacttaggagagtaaagttaccctctctggctggccaaaaaaatgtctttattcgataatggaattaataaaaaataagctcaatatatgacatttgagttcttgatagtacaagataaagactaacacaagaactcaaacacattgagacatcactaaaacttctcagaagttatcattctttcaagaggtatgaagaaactaacaagacaaggaagactaatcaagagagtttctcaatcaatttgagctctttagcaacttcaagcataccactcactggatcttccttcttatatcttacacatctcaacgctaatctaagaaacgctttaacctgagaccgtctcaaaaccaaatcatcatccccacccaaatcattccatatctctttatcaacaatctcatcaaactcacctttctccattacctcagacacatgatcattaagcgacataggagcctcatctggtccattaaacacagcagctcttccagacaacaaaaccaacatcacaacaccaaagctataaatatccactttctcagtaactttcattgtccagtaatagtccggatcaacaaaaccaatcacacctttcacatcatcttctacatacaattccccctctggtattgcaacacagaaccagaaatcagaaagcttcgccgtccaattctcatcaatgaaaatgttcgtcggatttatattccgatggactatagtctctggaaacgccgtgtgaagataagtcacagaactagctatctctttagcaatcttcaatctcactttccatggtaaaaccactccacttgagagtcctccgtctctattaagcggtccgtgttctgtgtattcacagactaaagctggaagatcaaactccaaacaacaacctataagctttaaagcgttcttgtgtccactcatctgagaggatacagagatatctctatacgcttctgtgaagcttgagagattttgactcgaccatttcttgattgaaacttgtctttcttcgattacgcctttgtaccatatgaagtatccccagctggagataattcggctttcggagaaattgtcggtagctttaaggatctgatcggaggagaagcaacgaatcggattggttttgccgtcgaaggaagcgattagctcctctaatagaatccctccgttcttcaaatcccatcttctcttcttcttattgttcttgctcatctctattggagaaagttcgaaactttggcttttgcaaagaagcaaacttgatttgtgatagtcaactactgagtggtcaaattccgacaaattagatattataatcttatccatgtcgttttagttattaaatattgacccaatacatttataatatacattctactcccataattagatatttcaatttgatccacatcttcttaaatattacacattgagcaaataagttaactgtagctactctgcccaccagttagccctcttcatacaaatgcacacaataaactttgtaaaagtttcctctatgtccatctctcaatcctttttagttccttggcaacttccatcatctttggaacatcacctctatgaccagtacatctgagtgagagcataaggactgctttcattcgtcgtatcttgtgttcttcggtttcatcatcacccatactttccaacatttttggatccaacatgtcaaagattcttccctcttccacaaatttggatatcctatctgaaatccttagattcattacattttgtttgtcttcaaactcttcaaatagactctcatcttcactgcaacaacaatcaaccactccgtacgttcttgtgaaaaagttttgcaacaacactccaaagctaaaaacatcggtatactcggtgatcaatccggtcgccgcgtagttatactctagataatctaatgttccttctactctatcagcatgaaccttaacaaatgtctctccttctggaattgcgatacaaagacaaaagtcacttagctttgctgtcccattggaatccacgaaaatgttaaaaggttgtatatccgtatgaatcatagttcttgacaacgcggtgtgaaggtaagaaaccgcaatcgcaatctctttggcaatctttattcgcattctccacggtaacaacatttccgggtttggagtattgaatggtatacgttctgcatactcgcaaactaagaccggatgctcaaactcaagacaacatcctaacaatttgaggaaattcttgtgaccactaaccattgatgagaccgctatgtcacgacagatcttttctaatgtatcagatttgtagtagttccatgtggctcttttgatcaaaacaggacggttttggagtatacctctgtacataaagttgaaccgaatcacgagattgctctcgctgaagttatcggtggcttggaggatttcttcagcagagaaggttttgattggattggatttgccattgcaaagctcgatgagatcttctaagagtaccttcccgttctcttggaaccatctttgccgttgatttgcttctgagttcttcttcttcgacttcttcctccaacaactcatcttctgatcattcatcaatacacagatggatcagtatcaaagcctctccccaagaagaaacttttttttcgtgaaaagattagaatggttcaaaggaaagtgtatgatttgattataacatttgaggtcaaagaaacacaaataaaaacattaaaaaaaacggctgtcttttgggtcccagaacaatatttaaaacagttcggtcaaacttataaaggtcaagacttttttttttttttttttttgtttctgtttgattcttgagttggcactgagatgctgcgaggagaggaatgaagacagaccaaagatgattctaagcttaatcctcctataagcatatatatatttgaaattttggcttgaatgctttctttttataaccgatttctatttttggcggcaaaaatgaaatttctatattacgacatgggtttcaaaattgcagactctctgcttcagattcaacactacattgttcttgtttttgactaagaggcaactgcttaacataacatgtaaaaattgcaaaagcattttgcttatttagttttagacactatacaaagaaatttgctttagtagtagactttatttgggtcggacttaagacactttgacaaagttgcgatttgagttcaattcacaacaaatgcaaactcacaaactctcaatctctctgaagaacaactcgattcagctcaaaagaaagatgaaaattcagcaagatcaatcagccaaaatagatccggaaattcactagaatacgtacgaggttacagatacaagatctagctctaagcctctaacaatgaagtatctctttcaacttttctgttacaattcacaaatcacaacttacaagagcaatgaccgtttttgaaggacagaagaccctctcccacggaaagaaggtttcctttgcctcttcaattccggttcatcaccaaaccattaaaccggaaatcagctcttcacaatcctctgattaaaccaaccacaaaattgaatcagaaaaaccaatcaaccacaacagtaagagagacaagtcctactctctgaccaagtcaattgccgaacctcactctcactgttctagaaggtaggagtctatcatttcgttctgtggaattttcaacgatgggttttgtcttctgtattcaagccgggaaaaggtgctgtctttgtaatgcacccagaaagtttaaagagtggattttcagttgaagttagaaaaaatcagatctttcgcccaggattttcgctatttgttgaatggaatcgatggtgaagaaattgaagcaaaatctgagaactgggtcctggaaaaagaaggaaaaaagcatgaagaaggaaagatggttcttagagaatggaagtatcttcttaaaagagctcatcgttgattgtaatggtaaatccattcctatacgtagctttacttcttcccagattcgtaaagccaccaagaatttcgatttaagctgttttgtagctgaagaagggttctacatatggtacaaaggtgtaatcgaagatagatcttacatgatcaagagattctctgagtataaagtcactgattacagagtaagtgaggtttataaagacattgtcttgtctgctcgtatgagcaaccacaacaactttcttaaactactaggatgttgtcttgagttcccttttcctgttcttgtgtttgaatttgctgagcatggagttttgaattaccgaggaggtattacggttaacggtgaagagtctttattgcctttgagtttgaggttgaagattgggaaggagattgcaaatgccttggcttatcttcacatggcgtttcctaagatcatcatatatagagatgtgaagccactgcatgttttcttggacaataattggactgcaaagttgtctgatttatctttctcaatatcgctggaagagggaaaatcacagatagaagcggaagacgtgctgggtacatatggttaccttgatccattatactttgcaactagaattgtgacagaatatacggatgtgtacagctttggagtctttttgatggttgttatcactggtatatcggtttacttcaccggatctgatgggtatcctgtaggtattcttggatatatgaaaggcttagctgagaatgggaagctcaatgaaatagtatatcctatgataatgaaagagatgacaagtgctcaaagattgcaggtggaagcatgcgttttacttgcactgagatgctgcgaggagagggtagaagacagaccgaagatgattcaggtagctaaagaactcaagcggattgaacatcatgttttgagatcctagctagagatcagctctactcttagactgtatagccaagtttcaaatttattacttttgaaagtttggaacgcatatgattgtggacctgaaggatgccaaagagtttaaggggttagaaagacttgtgaaagcctctatgtccgacccaaacaaagtctactttgtgtagagttgtctaaaagcctatgcttatatatggtctttctctgtttttcagttttctctagtatttttgttgttatgtatggctagatttcagtttggccctgatggcgtcataatgaaactgcaaagctctgcattattagtttcagaacttacaaagatggtttacaatgcccaatatcacatctacttccagctgagttttcatgcaaggtatatcatagacataacttatcatgaaaacaagaaccacttttacttttaacaggaaaatgcattaagaatccaagccaaatagatacataaatgcagaaatacatattggtaattgtagaagatgtttcattttaggcattatagggcaagcataaatagaaaaacacactacattcatggaaggtcaaatgtcaatgttcaagttatatgtgtctccgagtttctctgagttatagctatatgtacaaatctgagttcacactacagaaagattttttttcttttcatttttgacttcacagtccaagaacagagaagaggtatttagctaacacctttcagtgatgtttcaatccgcttgagttccttagctacttggatcatcttcggtctgtcttcgtctctttcctcacagcatctcaacgcaagtacaacgcatgcttccacctgtgatctttgaccatttgtattgtctttgaacatcattcgatcaattactttatcgagcttcccattctcgtataagcctttcacatagccagtaatacctctgtattccccatcaaatccagcagagacaagagctggtctagcagtgagaacaaccatctaaaagactccaaagctgtacacgtctgtatattccgtcacaaacttcgtggatggatccaggtaccctactgttcccattactctttcagtttcaattcttgtttttccctcaggaagagagattggaaaacgataaattggtcagcattgcggtccagttcttatccaagaaaatcctcactggcttaacatctctgtgtatgatgatcttcggaaacgccatctgaagataagtcaatgcatttgcaaactccacggcagtaaagtttcctccccattaaccttaatagctcctcgatggttcataactccaagttctgcatcttgaaacacaagaatcataaaaggaaactcgagacaacatcctaatagcttgagaaagttgctgcgattgctcatgcggtcacacaagacaatgtcattgtaaatctctttcactccatagtctggaacttggctttatagtacaataccagagaggatctgtagctatgatctccgaaataatgtctcaatctgcttgagttctttagctatttggatcatctttggtctgttttcatctctcagctcgcagcatctcagcgccaacaccacacacgcttccacatgcactttttgagcacttgtaatgtcttccatcaccttaggatctattactccatcaagctgcccattctcatgaaagcctttcacgtagctagcaatatgtttgtagtccccatcagagctagtggatgcaagtgctggtttaccagtgagaataaccatcaagaagactccaaagctgtacacgtcggtatattccgtcaccattttcgtggtataatatactggatcaaggtacccgattgttccctgaacacattcaacttctattcttgattttccctcagggaggtttatagagatagagaaatcagacaactttggggtccaattctcgtccaagaaaacattccttggcttaatgtgtctatgtatgaggatcttggggaatgccatgtgaagataagtcacagcatttgcaatctcctttccaatcttcaaccttaaactcaaaggcaatataacttcctccccattgactataacacctcctctgtgattcaaaactccatgttctgcatattcaaacacaagaaccggaagactaaactcaagacagaatcctataagtttaagaaagttgttgtggttgctcatccgagcagacaagacaatttcgttgtaaacctctgctactctgtattgagtaactttatactcagagaatctcttgatcatgtaagatctatcttctatgatacctttgtaccatacataaaacccctctgcggttacaaaacaactggaaccgaagttacttgtagctttcaagatctggtcagaagaaaagttacgtataggaatggatttaccgttacaatcagcaataagttctttcaagaagatgcttccgttgtctaagaaccacttttcttcctgaatgtctttttccttttccttccttttctctaacgatccagatctcagactctgcttcaacttcttcaccatcgatttcatcaaacaaatactgttgtttcagttttcctctttgaacaagaaagacttaatatctgaatgcatacaagatgttgagttactactcttcccgatttgaaatttggaaacaaattccaaccattgacgtgttttgatagggactcctcacatcccatacaaactgttatccatcagcctgtcgtagaaaactttttggttaggcttattttgtgttcccaccttattatcttttggatgggcttatattgttttcccaccttatgagcttttagttgggctttatttttctataggcccagaaacttgacccaagactttttattgcttcttcctttcttatgacacaccgttttcaaccgagagtcgtttgggatcagaaaagaaatggcttttgacacttcagaagcttttaggtaagaaaggtgtcctctttattcatctcgccaacaaaaggttgatactttggtaaaggaactaatgaagaagcagtatctgaaatctggatctgggacaaggaaggaaaaggacaaggcgaagaggtggttcttggataacggaagcatcttcttaagagaacttgtagctgattgtaacggtaaatccattcctattcgcagtttttctcctgagcagatattgaaagccaccaacaatttcgattctagctgttttgtctcgcaagatgtatactataaatggtatagaggtgaaattgaagatagatcttacatgatcaagagattctcagaggatgagattacaggaaaacgacatagagttaaagaggtttacaacgacattgtcttgtctgctcggatgagtaatcacagtaactttcttcaacttttaggatgttgtctcgagtttccttttccggttcttgtgtttgaatttgcagaacatggagctatgaatcagcgaggaggtgttatagttaatggtgaagaatctttattgccgtggagtgtacggttgaagattgggaaagagattgctaatgcggtgacttatcttcacacggcattccctaagatcatcatacatagagatgttaaaccgatgcatgttttcttggacaagaattggaccgcaaagttgtctgatttatccttctcaatatctctacctgagggaaaatcgagaatagaagctgaatgggttctaggaacatttgggtacatcgatccattatatcataagacgtgttttgtgactgaatatacagatgtctacagctttggaatctgtttgctggttattattactggtaaaccggctatcatgactatttctgatggagatctccaaggtattcttagcttagtgagagagttatgtgagaatgggaagcttgatgaagtgatagatccgaggttgatgaaagatatcacaagtggtcaaaggttgcaagtggaagcatgtgtggtgctggctttgagatgctgtaaggagagagatgaagacagaccaaagatgatccaagtagctaaagaactcaagcagattgaagcatcattgaaaaattctagctagagatccgcaaggaactttttggatattgagatatcttcgcggagtaggcatcacaagaacatgactgaagataggagcatctttggtgcccaaaagaagaggtatcagttgcttggactatataaatctaagtaaacaattcttgcattgtgtagcaaggaaactcagattcttacatacaacatatttaataaaagctcgatcaaaaacaagatacagtgattgcaattttcactactaagcctgtataatagatagacctgtttcaagtcgcattagaaaaggttgcatggtcatatatgtttctctatcttcttaagctcttttgcaacgtctatcatgcgaggcacgttctctcctggtctgaatcttacacatctaaaagcaagctcaatgaacgcttccatttgcagtcttgaatgcttgggaatgtcatcactcgtgctgtccaatatcgacgggtctatgagttcagtcaacaaacctcgctccagaaacttcccaacatagacaggcaatacaggaagataaacagcgacttctgaattgtattcagactttcctgtcaaaataattagcatgatgatcccaagactatagatgtcgacattctcggtgaccaaacctgtattaaagtaatcaggctcgatatagcttgatgtcctgcaaaccatgtcatttacgccagtttcaccctctggaagcactatactgaggctgaaagaagagagcttagcggaccaattctcgtcaaggaaaatatttgcaagctttaaatccctatggattatagtcctggggaattcagtatgaagatacgctacagcatctgcaatctccttggcgattctcaaccttacattccaagggaatgaccggacgccttcttttccacatcttatacagtttagagctccatgttctggatattcacacacgagaaccggacgaggaaactctagacaacaccccaagagcttgagaacattcttatggctactcatcaaagatgaaacagcaatgtcacggtaaaagttgtcagcgtcgaaaacagaacagtcttggaatttcttgatcagtacgggtctgttttcaatcatgcctttgtaccacacgaatctgtcttcagagattacgtagttccagtcaaagtgatttgtagcttgtaggatttggtcggaagaaaacgtacggatgggattgtatatacctcctgaagttgcaatgagttcttccaacagtaagctcccattcttctggagattgatctcctcttctttcttctgcttcttcttctttctgaacagacgcaacatctctaaactcagaaaagaatattgtcttgtgagttgtgaagaaagggacacaagaaagaaagagagtcggagacgcaagaacaaatcaagtcaacgaggtcacttcaaaagtcaacaacttctccttttttttggtctaagtcaacaacttatgaaacataatgtgaatcataagatttttcacttgatgacattttgtaatgactaatttacaaatatgttgaatatttttttataatcattattataagctataatatttgtccaataaccagttttgaaaatcaagggaccatccacatttcaaaaaccagtagtcaaaaattaaaatgaacataatcaagaagagaaaatttattcttgaattactttctctgttttattaataaacaagtgaaatggaaataaataggaaatgaataagatcacataatgagttgttattacataatgaaagatagcttagtgcaagtagtagctgaagagggagacaagggaagctccaaccaaagagccaagagctggcaacgcagccgaggcggcggatgcaggtcctggtgccggagctccgacttcctcagcagccatgacggcggtcatggaggcagcagcgaaaagcacaccgcaagcaatcttcttcatctccattgtttgagacctgaaaggcttttcttttcttctttttatttagtttttgtgctttttaaagttcttgcaggtctgaggaatatggatggtgttgatcgggaatttatatgtgtggaactagtgttatttttagtaatatttactttgatttacctaaaaataactaagtttaaggaacattaggagggtaacaaaacttatgatggtcaataataactaattcgccgttaaatttaactacaatcacggtgaaaagagttgcaacatgtggcttagatttattttagcatttctgtttgtattttcttgttacatgaacatgagtttttcatatcaccatccggttatcagatttcttttcatgacgttttttctttttctttttcatctaatcttcggggacttcaatatgagaataatatgaaaagtttcagtttgggttattttgggtgtatatcaatattacaatatctaagaaaaagaagatccttaagactcttttactaatctaaattcactaaactttacgtatagaaggaaacaacagtaagtgtcagatagatttgtacatggaactatcacaatatatacaacataaacttgtcctataaatattcacgatgaaaccgcccaaaaccctcaagaagctgttccattagatcgtcgagcctcaagttcgtgctcagcgaccataacacatgagtctgcttcaagcaatggaaccgaactgttcatcttctcaactatctcagcggtcaaagaatcgatcatacctgtggtacactgtacatcaggtgcaatccctacttgatcaatttcgtgtaaagacggagacaaatacttagccaccgtcacaaacaaagccgacccatcgtttagctctgttatgctcttgcaaaatcacaaaacatacaacaacaaaaaattcataagatcaatattaataaatttgtattgtttaaagctgattaatgtacatacttgaattttccctttcccaaatgtccggttaccgacaagtatagctcgaccattatcgtgtaaagcacctgccaaaatttcacttgcactagcacttccttcattcacctgttcatcatttgatcgaaaaataaatttggagaggtcttatataccaaaccgaaccaaactaatttctacaaccgataaaacagaacttaaccgaaatttcattgcgttgattgatcacctagtcagcttatatataggtacttacaagcacaacaagtggatcatgtgtcacagcgtgtccattgatcatgttgatcggtgatgtaaccccttctcgatcgattgtatacacaagagtctcatctccgtcaagccataattgtgcaacatcaagaccagctctaaccagacctccctgatatggaatagccaaaagctaagttgtcggaaaatgatcaagagacgatcattcgcattaaaaacaaaacctgacatttaccggattgttccttaggtctagaatgtatgactgaacatcctgattctccatctcgtgcaccgcattttccatatcggacgctgcagtctatcagaaagttcaaatcagtgaagtagatatcattttgcctatcttcttctgtttttcggtttcacaaacactaacctgtgaaaacgctgtgagtttgacataacctgtcttcgctaaacgtccatcaggtgttgtatgtgggattatagcactggatattggagatagcttaatgtaatctcgaggtaacttgacctttacatatatgagagacatttatttagtaagtaacccgaacacatctaacagaaacagcggtaactgttacctctctaataccagaatctgtccctgatccattcacctacaagaaatgacaataacttaattggttttatctcaactatacagggttttcaacaaagagaatgtagaggtaaccgaatagtacatttttaagttttatggtaacaaatgttccaactcggcctctcagcttctgtgctgctgcttcactatcaacatcatctaatttctcacctaaagtctcataaagaagaaacggagttatagccaaatttcagcaatctagttggtaaagataaggaccaatgtaccatttatctcgactaactcctcgccttcatgtataccagcacgatctgccgggctaccttctacgcaagacataacaacctacattgggctctaccatgaaacaagatctacatacttcatgctcagaaaatgaacaaaaagaccaaagaccaagcttatttgggtttcaagatgtgtttgatcactaaccaggtgacctgttcttggttctgagtttatgaaaaggccaacaccttggagatttccatcgctgccaattctgaaactttggtactcctgcaagtcacaagatgtgtcttaactcttaatgcagaacaactttcaaatcatgcccaaaaacactaaagggcacactcatgtagaatcaaaatttgcaagtacctttggggtaatgagtcgagtaaagggatcaccaagcgtagagagcatagctttgagctttccataagcagcatctgctgatcttagaggaaacatttccaccatcgtctgttgcaacttaaaatcccaatctgcaaaatcaatacactttcctcaagagataatctacaaaatcctcccacaaattcaaatcaaaatctgaacattgccttgatgattaaaagttggatcaacaaatgtttctctaatcaaaccccaagcttccacaagagttctctgtactgtagtaaccttaacaaaacatcaaaatccaaactttatttctcagagacgttaaaaacagagaaacagagctcaatgaaaaaacctcgatcacctcacgagcacgtgaaacagggaaagcgatcgttagagactcagctagtgccggggaatcacaaaagatcgacaaagaaaccgctactgaaacggctgcggctaaaccaagcaatcttcttccgatggtactgttgtcaactatcacaccatggctctctgaaacggtcttggtctctgtatagaaccctagacgcgaagacgatgcaagacaagaacgtttcttatgacgcttgaagctcgaaatccgaagaatcggagatggaatcgaaaagggtttccgagaattcgggaagtgtaacagaggtagatcatgatttagggttacaactttttccatttgcaatcagtatgaatcaatcagtgaattgagtgaaaaaatctgaatttccttttatcatcgctaatctaatgacgtggttaaaaagtttacgacatttaaactcaaattatggaagattctgtaagtgggcctacttgaatctttgtggcttagagattttgctgttgcgtatctctaaactaaactaagaactggaatatcttacacgtgttgtgacttgtgactgacgttaacgtcagtgtctgaggatggaccgatcataatccgagccatgactcccattgctttatgcgagattctctcggtaggatgaatttcattttatgtttgacgcatcgcatatagttagcctgactaaggcatcgatatcaaaagaagtaatgtcagctctcatgaaggtaagagtcaaaatctgttttatctgaatatgggctggattatttacttgtacaaatagaattataaggcccaatttaccatcaatttgggccttagactggaactttcggatcacacttttagttttatgatgtatactgagatttttatgggaactcaattttgcacaaggggacatgacgaactgttatgttgtttggtttgttttgaaagaacaaaatagtttttagaagattaactaaacttatgaatgaaattatcactgttgttagctagatgatatttcaaatgttgctttgaataataaaattacaatttcctcagaatgttttcaaagctctatatcagtaaatatgaaattatgaattcagaatccacatgaatcaaaaatttgtaacaacgaatattttgacaatatctcgtaaacaattattgcaacttcaagttttagcgttatcgtgtgctcaagaaaactttctataaaaggtaatacacaattaataacttgtttttggcatagacatagatgatcaccatccagtccaccttgacacgtgaatgaaattaattacagtgttgcatgtgcatgcatcgggaaaaataacttatcgattttggaactgaaatttagggttttgactttagagatggaatgtttagaagatggacatacacttcatctccaaattgattgcttctcctttggaaggaaatttttgtaagtatggggttcctcataattcataaacccatccctctcgtattttgtctttcacattagtcccaacgtgaacgtaccctttgttatgagttccgagactaaattcttaattaatggtttcattattaccaatataaaagtactagtaatattcgtcaaaccacatgcacatatctagagtctagagatatacaattgcttatagttagtaaaatacggaaattttcattatagctaaccttgtgagaagtgcatcgatcggttgaaagtaatttctttatctgtgatattttttatatggtattgagttcagttgatagaacgaacactattagattgcaaacccacttgattatagtaaaatatctttttatactaatataaggaggattatattatacaaaatagtttttgaagtatccaatcatacgatttaccgaaagatataaacaaatgtagccagtcgtatgtttgtttacatgtcccttaatactataattaattgagtattatcattttgttttcaaatacatagaatcataacttttaaaaaaacgaaaaaaacaggtattccaaaacaaaaacaaaaaatcatttacctaatataacacgcagatatggtagtttttggtttttatctaaaatagtccttattaaaaacgacaaaaaaaaattagaaaattaaccgaatacccttacaaaaagaaatatgatcaagtagctcttcttttttaaaagaacagtaataaattcatcttttaattttggttggttttctgaaaagtaattgaataaaaaagaaaacaaaggaggtatgggaaaggagataaagacacatttcacttaaagcacattgttgcagacaaaaagagagggttgaaaataaaagacaagaaaaaagaggaaaaacaaaaacaaaaaaattaagtgagagaggataacagagctgctcttatcaaagtccactgttcataaaagaaaagagtacctgaatgaaaataccttcactgacaatttacttatgttatgtggtccattttgttgttgttgtcaatattgtaaatggaagtaagatactaaaattatcataactagttagttgaccaacaaaccacttgatgaaattgattgtgatcttccaatcaaagcatctaaacattaaagtgaaatagatttgttaggtctcaattgatgagattttttatactgtcaaaaccatgaatatatggatgtatacatacgattttagtggtaactaatgtaagaaaggttgcatgggtaaaattgggaaatgggggaaaagagtgtgggtatttctttggagttatgttaacctcaaaatagaatctctcctcaaagtaattggaaagacaaaagtcgatgccatgtccaatcatataaataaatatttttctctaatatgaaaaagcaccaataaaatcatatttgattttcttccaccttttctgtttctatttctttctcctggtatcatctgcccctccgttctgtgatggtctcacgctctagcttcagtgcttcacacacagatatgtatgggtatgtgtgcatgtgtatagatgcaacatatgaaaaaaaaattctattcaaaataagtgtcactgagattagtataaaaaccaaaagaaaaagtgacattgagattaaaccatgcatatataaattttgatttacttaaaattcatctgtaaataagatttgggataatatactggatacaaaccccatgtcacaagaaatggtgctaatctagtatcatttgatcttcgttttactagatatcaattctctattatcattgtatattatatgaaagcttaattatcatgaacacccttaatgaggtttaaaattcaatattgtttgtttttgtttaagattattattactaaacaaaaacttgacagaaaaagttttgttttcttgaacttttatatttcattgggataatattcgctggtgaaagaaacccaacactacatacaacatggagaatctacaaagcatgatgatcaaatagctttaacaggagtagaaaaaataaagttgatcaaataaagaatatggacaaaagaacacgctcggacaatgatcacgagctaacgaaacaacctcatctctaacgattatataatattattatttgtatcacaagaaagaagaagttgttttaagaatatttaccataattactttgccaaatggattgtattatattgtttatagcatcagacgttcaattgcgctcgatcgactatgataattcaggcggacagctggtttgaatataagtttatttcaagctgattctcgtgttaattgttaagttgaaatcccaaaacgaaacggtcccaaataaatgatttaattacgcatacagttacatttttgatttttttaaaaaataggataacaactcaaactaaaacaatcgtttaaaatttttatcaaaaaataaactaaaacaatcattaaagtagctaggtacatttatagacaaattttttttgtttttttttttatagacaatattatcttacaaagtttgcgaatgatgattctgtaaaaaaacaaaaaaaaagagtatgcgaatgaaacctttggcgataatttgaatctcaatgaacactcttccccttcattattgtttaagaaatgattagaaggcacatcatacctacatattgccctcttacatgtctttgtttttttttacttgtgatctataaagaaatattgttttccatgcactaatttaaatgttatatatatatatatatatatatatatatatactccttaaacaataattttaaattgatatatataattatatatatatatatatatgctgtttatgtatgttgtttacacaagtatttctttaaatatgaaattagtttattcaatatatttttttgtttgctcttttgaggtacccgtgattaatcatgagtcaagctcaatttggcctctttctccctttatcttttgcatgttggggcctccttcaaacaaagttgtcgaaaatcatatattgctacattaatcttctttatgtgctacttaatcttaataatcaaatttatacttttctttcatttacgttttcgttacatatttacgtatatgtaattatgtattatatagacaaaacaaatacgtcacacggtcacaggaagattttttccatgataaaaaaatactactaatgtaaacagtttacgtacgtgtgtgtcaactaaaataaattaaatgtgggagatggagatttgagccacggcagacaaagctgtctccttcagatcagccttggaatatgaacagtaaaactaaataaattaattcagttagtactagtaatttacacatttgcatatctcgacatgaacataggaaattgtaaagtaattaaaatttcgtttgacggatttagaatattgcttcgggattttaaaaagcaggaattaaggccttttattcaagtttttttcagacaaggaaaattgtctacgtgaaaataaccaatgtataaactttggttttataaatgcattagttaatttaacagcatagttacggaacaaagtgaagtccaatgttcggattctttccggcaacagtaggaaaatccaaatatatgttgctcggattttgaaaatgtcttttgcacactcacagagaacaattcagtttcgagattcgaaaacttttaactagtactccattttatatcaataattttccatttatttttatgtttctttgtgtgatctatctatcttaatatataaacatgtgcatgtagacctttaactggatatatatatgtctaagcaaattagaattcatttgaccaaaaaataatagtgttcataactaagttgtaaattaaaaaaaatcaaagttttagcatgttaacttatatcattcatttatataattatattaaacataactatttctcttgcttctttatcactttccaatgtgatataaactgttgggactttttaaatagtttaatcataaagctatacatagattccaaaaatataaagtgacaaaagttaatctagaaggttttctaccgtattatagaaaatgtcgatttgaatgactagctaaaacttttactgcttatatgttatctgtcaacgcatgacttacattttaccgcatataaaagatgatctaacattcgataggaaccacttaataccatataccaatatatatgtacatatttatcgatcggtagaaatttctggagagtgttgggaaaatgagaggggtcaaaggaaagaagagaggtagggaatagggatggtctatttctcccaacaaaggggtaggatattgattggcaataaatgttgtctgaatcctacataatttaaagatgtgcgttcataacttttccagattttctactgtttagtttcagcttgtgaccaatgttaaaacaacccatacattattgtatgtatatccatctataacagaatttttttttgcacattaatgttatgtatatccctccaattactgtatgtattaaaataaggtaactaactgttagggacacaactaatctaacattttagattaggttcaaatacatttaagaaataagatgagtaaacttgaatatgaaatgaatacaaaagaggcaagcatgtgggttttgattggaggagatgatgaaagttgtgtcatttgtgtgagagtgtgtgtgtagagagagagagagatggtcaaaggaaaaatgagatgtcaaatcaaataacagtgagtgagagagaaagatagagagcaaaaaaaaaataactgttgataccatcaatctttgctcccaaacaacccatcacaccctttgggctccactctcttctcttttgtttttttatcaccctccttcacattagtttgtgcttcttcacccatttatcatcatcttcatgtacatacatacacgtgtatatacatgactgcatgcatacgtatgcagatataggaaccgaaggaatattcactgtttatgcatacctttatacgtgaacgaaaattaggtcaatatgacaatatctaaatcgagagataattttggtttcgaattctaagattaaaaaataaaatgaaagtgaatcttatttagttcaagaggtgtaatgttccttcaacgagcaaatttgtctctccactaacaaaaaggagaagaggggaaaaaaagatagcaaaaagggagcatattgaaaagctctttgcaggaagaaaagcctctctttaactgtaatcttagtatacaatcatatccaaattggatcttgaattcttcattaccaactaactgacacaaaacaaaaactgtaactacaataacaagacaatcacttgtagtccggtaattttgttttcttatatatataatatatagtaaaaataaagaaatctttttgacaggcttcatcaggttaacaaatgcaatattcatttggtgcttattaatcggaaagttaattagtatgaacatcactacatatatataggacaattttttcatgagaacgaaaccaacaaaacattttattgaagaaacagtataatatatattataattgccttttatatttaaaatttgagtattacaccccataaaataattaagaaaaaatataaaaattaacacagatgttttgaaaagaaaaaaaacgcaatatactttaaacgtttcatttcaagtacttgtaaccattcaaaaacacaaggtattacgcaaacgatacaaacaaaaactgaagtgtttcaactgttgattatgtattagatcaagcaacatatacataaactaaaaaaagaaagagaaacggacgagagtagcttttaaactaattgctatgaattggtagatatgacaataactagcatcggcattttgatttgttttctcacattcggatgagttcgtgagaatcaagaattgttcagttgaatgatattttttggtaaattatgtactaaagatttgaattattttaatttaattttacatgcgttgataaaatataaaccaaaacacatctataattatttatgtattgttatattctcaaaacatatgggatgcgtatcatcatcacattatgtataatttggtattcgatcttcctaataaagttctgcacttgagtacgtagcaatattctctagtgtccattctctcattattttccatgatgtcactagacaattaagtatcacaagtattcttataaaataaaaccaacgataactccaccagaaaacaaatatctgttggaataaaaaaaaaactagaatctattattactcaaattgaaatttggaaatattcattttgatctagaatatggtatattaagagaaaattcttatgcatgaatgtatagcatctacttttcttgtcttttagtatcctaacaaacataatttaaacatttataagttatgtccttcgaattaacgaaaggtgaagctaatgacaaaataatatacaaatagaaataaaccgttgggaacctcattggttagactgctacattgtcttgcaataaatttaactaggaagctaaagatacaatttaaaattttccaagtgctcttgattcatttttttcctatgatcaattagatgatatagcttttagtttgaaaagccctacctccatcaaaacttggtccatagatttaggtttcttataattaatatatataccgaattacttagtacttatagtaatatatataagctatttagactgcattgactcatgatcattgtctaattgttctacctcagaggcaggctcatcttcttcatcaaacccatcaattccgtaggctccatgaccattcccaaaagccttgatgtgatctttgagagatctcttgtgcttgaaatcagatccacatatgcaataccaaagtttgccacaattcttctcatgtgttctccagtcccctcggactgcgaaagcctttccacatttcctacacatgaaaggtttgatcccatgttttctcttgtaatgtgtttgaagggttctgaagtctttgagaggctttgcccttggatggtcaatgttgttgcgacagcctggggcgcagcaatagcacggaagccttagcattcctgttggttgtgttccccttagagattcaggtccttttctgtattgtgatccatgtccccacatatgcatctgtaaacaaaatcatgcatgtatatatgatcatcatgtagggtttggataacttatagtatatgttcgaaaagttctaaaagtgtgagtcttgaaactttagcttatgatatgtgcattagcagttttaataacatgtgtcttctataagatgtaatgattactctagccagcatacatagattatcaatgttatgatgattattctaaccagcagacgcaacttaattagcagatcaaccttgaagcatatgtaaaaagacaataagatgtcaaacaaatgctgaaatgtaatcaaaattatagaaacgaatttcataaaaaaaaaaaatatatatatatatataataataataataataataataataagatatgtcaatgcatgcttaggttaacaaattaactaagcaaaacttaaaaagaaaaagatgcttagtttatgttcagtacaaaatcttatcaagctcatatatgtagcaaacaaatgaagccttatatgtatctatgtatattaattgaaatatgggtctgtgaaatcgtatcagtactgttattttacacgttagacatttgaagactctcatacaaaaaaagggtgacacacttgccaatattgtagtgaaaagcagcaaaccacagagactctgaaagtactaaagacataaagaacatttactgtcttgttaaatctcagtctcagacttcacagtctcaagtctctcggttctttgtaatgcaatgatttattcatgcatcagtgagcaaagacacgtcctctgattgatttgaaaacagtatgtatttatatatatttatttaccgatttaaggtgaaaacgtttttgttttttttcgaggaaatttagtgagcaaacctattttctttggtttttaccttttgggtttactcggaataatgaagggaaaaaagaagtcgatttacatggaaaagaaaacgaaattcttcaaaaagtaatgcgtattgagatatgttaaagatttagattaatgagagtgtgattaattaagaacctgcatgttattgtatctgttgaaggttttgaagcaaacaggacatgagaactgagtagggccaatgagaatctgagaaggtgtagggatccaatattgacccttgttgagtctgctgattctacagccgccgtctccgccgactgaatcttcatcgtcatcttctcctcctccgacagctccgtggctgtactcatggtcgaggtctttcttgtgattcatgtcctcgtgatgatgagtggtcctcgaggaagaggaagaagaagacatcatgagcaaagaggccatctcttgagcactagggcttggaaggcctatgtgaagagcaacggtgacgtcatggtcatcgtcatcgaggttatgatgatcatcttgatggtgatgatcgtagtcgacatccatggaggttgaaggtggttcttgaataaggtggtcatggttgtgatggtggtcttgttgtttgttggcggggctgaggctgaggagagggagggcttctcggagaggaggagaaggaggaggagttggtggcggcggtggacggcggaggtctccggattgagggaagaagaagaaggaagagggaggagtaacaggaggaagaggatgaggagaggggttagtggaggaattagggtaatggtgaaaaggattagacttgaaccagtctgtgaagaaattggaataaggatcagtcatggtgaagagagagagagaggaagagaaaggaatagttttaagacttgtgggattatctttatacaagagacatagatgggagatgaagatggagatggagagattgtgatgggatgggagagagagagagctttttttttgggttgcaaagagagattttctttgggtgcaagagaaaaagagagagaaagattattaattatggactgaaaactaaaaactgactttaacgaaaaaaaaaaaaaaaaggaactaaagaagcaggtcaaatacgaatgtgtattagtctacgcaaagtaattatttcattcagatatgtaggtccttattctttataaaaaaaataaaacgatggttaagaaataaccagtgcggttaagactgtttacgatgttttgaagataacatttatagattaggcagtaagcattagaaattcagatagtagattttttttttttattggtgatttgtttttgttaagaatatagaattaaaataattttttaatcaatttaaaaggttttcaaaatcttataagttgttataattataaactacaaatcacgttctttaattttcttactattataagatgtcttaattttcggacgacatcatagtctcataattcgtgtgactgagagtttctacgtatgatcatggtaagtaaacacagcgtctgaacctgcacatcagaactatataacatattacttcattgtatttttaaaaaccgtacaaagatctaactttggatccttattcaatttgtgtatctcttatacctggatcttataaggaaaaagaatgcaaaaccattgaatgatgtgaataattgttgttcgtatgttcaagtctgaattcacttagtttattgtcagactatggtcgttgaaaaagagagagtaaaactatgcttgaatatgacgattttttcatggtgattgttttactaattaaacgaattaaagtaaatctacaaaaggggctctaattatatgtattatctaatttgattaacattatcagattacgtaaggcttaatagcacaggaacttgtattaacatatttaaatcataaaagtccttaaatattccacatctgtggattatgtacttaattaaaagcattagtggatgccatttcatacaagtaggtcaaaatgtaataaagatgataataatagacattgaggattagggctcgcttgaagagtatacatacatacgctaaaataccaaagacaataatcttatagccaatatgacaaaacaaaaagctattcgagttcgacctatattggctccacggaaaaattggaatttatttatttatattcactatgagtgaaacaggattaatatataaaaaggaacatatttgacaaaaaaataaaataaaaaaatacataaagcatatgaggttcagatacatcatacaaagataatgtcactgctttttggagatggctctcatcccaattcccaaacaaattttcttatcttaaaagcctttcctcaaaaaaagaaaaaaagaagccatatcttatcagtttgagacttaaaaatagttttgaaacagggtaaatttgaaaaataatgtaactgtctaaataccgatggacaaattaattaaataaaattgtggcgtcattcccgactcatgagctaattaaaaaaaaatagcataaattaggacacaattctgattttacaatttttgtgtttgtagtttagaaaagaaataaatatcagtaaaatctactcctatgacctagtttcaaaaatatatagacaagaagaaggttagataaataatatctttctaggtttagaaggacaatatttcaaagtttgtgagtagttttgaagtattatcccatatttatgctaggttagattcattttaggatatagattcacatataatggatttcttcctcataaaattttaactataaaataaacaaaaataaataaattgaaaacacacatatgggaattcaataattaataaatttggtaatcaagtacgaggacccgagagaaaactggaatgtatgtattcgtaaaagttttggggggttttgattttctattattgacatgaattattaattcgatgaaccaaattatgtagttttgcttatgttaattgtttatttattttatgagttttaatatttatatgagaaaaaagggaagcaattgcattggtgtgcgcatcaatggtcggctttccctcaaacggtaagatcattgaatgtccaaatccccaccgcagatcctgcctcactgttccttttcttccttctccactttacccaatatctataattctaaattatacacaaacaaacaattatctattctttctttgttatggcacaataatatatatatatatatatagatatatatgtatattcaaatctatgaacaaaggaagaatgaaatatcggtcgaataaaaatgcggaacacatttaatttttgctgaaaagctatttactatatataatcggtgaaaaagaaaaagaaaaaaacacaacccttttagttatgctgaattgtgttttttttttagttacgaaatgcaattctatcgatttgaaaatatattttctttagctagaaaaggtctctctaggaaattataggctttccgtccataataacgaataattgataatatatgtgaaaacataaatcatttctttctgacggtgacccaaagtctactgtaaacaaaatttcagtttctctccaagataactttttgctcgctgagtaagttatccatgtttgttatgatgcaaagtaatcaggcgatgatataatatatgtgctagattcggttttaatatatggacccatcatattacgtatcgcctacattaccacatatcgtagttcaaaatctgattctcattaaactcattcaaattattcgcatatatatatgtgagttggcattaatcaattttaattagtatatgaaagttgtgatgattacgcatatatacatttaagttccgaatattaataaacatcatgatcttaaatttctttaagaaaaataaaaataaatcatgatcttaatttattgtcacaatactagtgtattttttgtgatgacataatttggttttatatatccatcatgacactatttatgcacaaaacgaaccacatgttcacaaagaacatttcatgttcactgttgcaattgtaatgttgttgtttttggcaatatatgtaggttataaacatgagtactattttcaccagtaacatctacattggattatttcgacctcatctttaatccaccaatcagttaattatgcaaaacacattcacatcttaacttgatcgattgcagcatttatctgtgtagatgcatggtgtataaattctgtactggagttgaatatgcccgaattaaattttgatattatggtagttgaataattccgctgtagaacttgtttttcatggtgaaacttctaaaatgtgttatttacgtagctcaacaattgttgaaacaaatggatggtatctttatcaaagtaaaagaacaaaaaattgtagaaattttcaagatatgatgatggaaaatacctaatgttaggaggatatataataataatggataatattcttaggatattaacttgagaaacattctttggatttgatataatatgggtcttagtaggtaaacctcatattgagtagaatttcaacggaataagacttcggccttatacaagaggctgggccctcacaagcaacacattgtgactatttgtatgtgtgttatatatacccatagagcaggagagagaagccatcaccatatggttcttctatgtccctctttgtgcttaggttttattttggatgtgacctttttatgtatattatgataaaatttaaaatttatgtgtcgggtcatgacatcattaattctatatagaacatttatattgcatgtgatgtttcttatatgaaacagttttatcgatactacgactaaaggtttaaatagtgattctgtttgctgagttcaactggtagaactgcaataaatacatacggtcatttattatttttatttttttaaattacatattgctgtatacgtacagtaattaaaaagaattattttgttgagttgtgaaacgttaatcttggatctgctgtgaagctatgacgattagatcagatgatgatatcaacttacatataagaatcttataagaatttttgggatattagacttgtattagctttgttcaaaaaaaaaagacttgtattagcttgtcatatagttttctcattgtttcttgtgtattgctctttccatttttgtagagcacaaaaaagaaaaagaaaatatcttatatatagtgaaaatctgcattggcgaaaactgaccataactttcatatgaacaaaaaaacagaaacagtgttgcatgaagtttttccatcttcctcaaattacatatattgttttatgagtgtcgaacttgggacccaactgttaataacttaatattctgttgacaaatgaaggaaggatgtggcacggtcatgcgtctctagtttagtgtgtgatgatttatttttggtataatgaaataaatgtgttagttagttatggattaaattaattatataaaatttgaaaagttaagctgaaacgttagttagaaatttttgaatcattctttttaccttacttgtttcgtttgttctgctttcttattaaccaggtttgttcaatttcgttccatatccgtttttatgttttgcagcagaaagacagtctctaagacaactgcgccaattagtatatgaaaacaaatatatatatatatatatatatatatatatatatatataatatgttggtggggacattgtggaagagaaatagtgacctactaattttttggacaattcaaatttaaaggaagtgtaccacaaactctaggcttcacctaatgtgtatatcacctactcttttgttataattatgcttatatacatatacacgatcgcaaacacacaacactcatggcaattctcatcatttttttcaattattctcatcatttgttatgatagataggagcgcattttaccatttaaactatcatattatttaatataatcgtatttctataactaaaaacattgcagcaatgttatcaaatttcaactttctttttccctttaaagcaaaagggtgaatatttaataaaaggacgaaaaaatgagtgcagcattcaaataaagtttaaataaaatctttagaccaaccttttcttgtttggtgggtacacatacgagaaaattagtgtaattcaagaaagcaagaaagaattgttccaatgatctatatgcattaacaaaaataaagaattgctgaataactaaatctaaacacaattaactactccaatgattgaagtagaaattttgtatatttttcacttgttttatgttgtttttgtcggttatcaacacctttttaagacaccaaaatatataagagtttactatgcaaaaccgatatatacaaacttttacttcagaatgatcttgtagtctagttaatttattttggaatttataataaaataagttaataaattttttataatagaatagattaataaaggttaagctagtagtgacttgagcatcaacctttccaaagaaacgactagtttgttctctctaattttatttccaattgaaaaagattgtaaaggaaatattctagtcccaacagatagagaaatgtataaaatttggtatagagagattcttttgatttaccatgacagagaaaaaaaaaagataactgaaaaacaataaataaacccatttagaaaagacaagtaaactatttgttgaatcttgcttaatactataataatgtattggtgagctagtgaaaatgaagggaacaaataaaatatcagtcttgggtttgggaaagaaagagcaaatgttagtgaaacatgcaggcatttttgcagcgatggaggacatcgatctgagtgtgataaaaaaaacatccattgctgctattaaataagctaatgttacatttctaataatatgtggaaagacactaaagaattgtaacttcttttttgaattaatagtaacaatcatgagaaatgcaatgaatcaagtaaataactactatacttttcttaagacaaaagctagggagagtacgtaataaaagaggtgtcgggaggagttgaccaaattcacaacttggggcagtctttcaagacagcacgaggggtagtctcaagagtgaagacgtcgtcgtttcctccactcttgtgttttttgttttttttttttgtttttctttatctaaacatccctcttcattttctttttcattcatctttctcagttacttttaaaaataattgatgcactatatattgtcaaatcagaatgtttggaagggaaaacattttcttctgtgtgatatgtactatcttaaagaccttaaatttagatgattcactgttaaaacaaaactttcgagatgcagtatatatgtttttctacatttactagtttcaattttaaagcatacgtactatgagcaccgcggttaattaaatcaaaagcaatgcatttgtgtccgtatccaagtttattatgagtactcaacttgacacaaatgatattgtagataataaaatgtttcgtttatcaccatgcaaaatttcaaaagaaactaagtaaatgactattttccaaatatttcctctttgttattgaaaggatacttgaccgtcttaaatcaaaataaactgaataattctaagagtttatgttagcaataggtgtgagatgttaagcgagcagcaatgtttttaaacccgacccagataatgaaccgaattatcttttgggtcatcggatcaactagcttgaactacggaccaattgattaaaatttattaataaattaatattaatagagatcttagagtttttataaataaaaaaacaaaaataatcaaatcatgtttaataaaatataaaatcaaacaataataacaaaatgattaaattttttaaatccaactaaatgtttaacattgtaacaaatatagtaggagattaccaatgacgaaaataaactaataaaacatcgtggattcaaacaactaatctcggttgtctctttcaccattcgattcattttttaaggcgacattatgaagtgttcaccaaaatctaaaacataaaataagtttaaaaactaatcggtttcatctatttttatgtgatcttagactatttagacatttattttaaaacatcgattaaagaaacaaaagtgttaaatcataaataaaaattagacaaaacattcattaaatttatatcaaatactatgactatcaagttatataacttgtatgaacgtctagacgaccgtgtttttaaaacactagttagcaccaaaacaataaatacttggttttcgcaaaacgtaattatcacaacacatgttttccaacattaagactctgaacttgtattccttaggacacatgtgggttgagacggtccggtgtgtggaaggattggtgcaaacagaatagtatcaaacttacatgtaaatttatttttatatataccgcagtgcacatattaaaccgcccgtgaagccataaacgaaaaccgacaccaaattattcaagaaaacagaaagtacctaacacaattaggtggaatgacaaattaagctggttattacaacatcgtaagcgaaacacatcaaatcagatcaaaatgtcactcaaaaaatgcctccaaacgtttgctcaatatgtcggcagatacatacatctatccacttatgggataccaaaaagtctaaaataaaaaaaataaactacagatatattaaattagagataattgagcaagaggctccacctgaggattggacagaacaatcaacctcaaaagtgatgtcatcagacttgagaaacattggagtatgatttgaaaggaagaacctaaattgtggaccataatgaaagtgtactgaatctcagagctccactctctgcatcaaatcgaagcatccagttcctgaaagcgcaggcaagccaagacagattctagcagagggggtttctaatgtgtccttttctccataagtagctgcttggacaatgaacttagtggctgtttcaaaagtcattctgcagaatggtgaagttgattctgcaattcctcccatacggctcattggtcggtatccaccggaaaaggtcatataatctgcaatgaggttcaagtgtctgatgcttacagaaatgccatatgatttgaagacgtggtttatttccctgattattgtttctctagctgcttcaactccaaaaatgttgagcatatcgtgaatgctgttgctatacaagtacctgacgtcaagtttatcttggaattcccacagtgcagggaaatcaactcctgatgcgtggagagctggtgaggctttcttttcatcgttggatatttctcttctctcctttggattgtctccatggtagatcacctgaggatcaccacaattagccactgtgcatcgttcaatcttcccagaattctggatgtaaaccttctgcgccgtttgttgagcaatctgtaagaaagaaaaataagggctttgctcacatcatcaaagtcataagagacctagcttttatataaaaaaaggtacctgggcaagtaaaatatgagggtcatctgtagcaaacttgaaatggacctcaaatttctctccttcacctttcacaaagatatgtctgtcacttttagctcgaacaaatttccgtctcttttttttactctgttctttgacattctttaccccttttacctctttttgaggttccatagactcttcctgcggttccggagtatcttccttgctaacttctgtgtcctcattctcactatccatctcagggtcctctactccactgattgaagatggttcgttcgtctcatcttcagagttttcctcataatccatctcatctgtttcttgtttcttctgtttctgtgcatctgaaccaagatcatcaacttctgtaccctcgccatcatcatcaccatcatcttcattctgctttccacttacagaatcatcattatcagtttcatttccagctattggacctgtgacatcattgtgtatgccccttattctatggagcattttcatgtgggtctctatagcgtcctccaacttccttaaaaatacagccctcatcgtctcttcccagtcttcttcagtgatatcggtgtgcttcggataatgctctggcttatagagatttatcttaagcttgtgaatactacaaacttcattctcataaaccgtatatggtacaactgacagttccatgctctttattatatctgccaccgttatcttcctcaacctatcagtaatatcatttgcatcctccctgcacaaacgacaaatcataaaagttaggatcttttcacgtgtaatatctccaagatgttgacagtcaatggccaatgttgcactttcatattatatgtcaccacaaaaatacagttctaagagaagctgcccatcaattttctgttttctaattttagtaatgaaagaagtcgagagataattaacgccaacataactaaaccaacttactttgttttgcctttcagcaacgggcatgtcattattggtgtcttaatgtttgctgcagctgtcatcaaaatctcttgtaaacgtggaattccaagtgtcacattcatctctccacgtccagcaagatggaaagtattcaacctgttaattgacagaacaaaggattttatatgcaaatatttcaggaaagatgcaaaagcaaaggcaaaagctgcaagcatcctcatattactcagagatttaagatttataaatatgagtaccaatgtgattcagttcctaatttgcacggtgaaagaattagcaagaccacaacataaaaaaggaaaaaaaaaactcacgtcatctgtgttgatggctctcctacagattgagcagcaagtacacctacaggctcccctggctgcgcaagacttgcaaagaattttgacttcaccagcttcagtagttcttcttgtctcacaaatttagaagcaatacgttcattcataggcattgcctctacaaacttctcagctcccttcttaagactaataggcagatcactgatgtaactactagctccagatagcatgtcttcactgcatttttgaaggaccatatcttgattctgaaccaaagtaagttaaaataaccacataagtttcccaagagcagataaagaaaaggtaaactgtcaaaaacgaaggcttactattgtcagttctttgaacttttcaatgaagctagaccgatgaacatccacaccatcttcaccatattggaactgaatgatggacccatcagcatcccggacagtacaatcatagttgactttaagactctcaagatttttcatcaagcatctttgcagatacccactacgcgatgtcttcactgcagtatcaactaacctgcagaccagaatttttaagtgttcacaatgcgacgaaataaagataacaaaccagctgatgctgaccgactcttaacaaaattttcgtaaggattacaacagaaaacctcaaccaagtaaaagtttaacacaaaaaccagatatatcaaagtgaatgcccacacatcaatttgcaatgcgacagcatccttcaaagaatagcatatcttttgaaagtcgaagagtagaaaatttgacagctccactatcagaaaagaagtttgaaacaccttctatcttaaaagtaattaacatataatttatgtaggataagtattagttacccttctcgtccagccatgcaatggaagtaatattcttgggggcgaagaccacttaggaatctgtcactaataaatcccccagctctaggggaccagtcccatggatggaaacaaggtaatgtcttcccagaaaccattcggggaactctttttccttctaaatcttgctggccaaggtgtgaagagatttgctggaagttaacctgctcaaagtagacaacaaaagaatgaaatgataaagcttcgcctcccaaaaattgtaatttactctccacaaaactatatccctataatatatgatgtttagagctagcaactccacctagttgaatgcagagaaagttgtaaaatttactttcagagctaataggcttcattggaaaaacaacaaaagtaaatctatatcaaattgataataataagttatctatattttcaaaaaccaacttgtttatctccttccctaaatattaaaagttatagcttggaaaagttggcatgagctaaaaaatctgcagaaggatgacaagatgggttctaagaacacagaagctacaaaccgacttctagatactgaaaatgcgtacttaaactatcaacaacaccgtgcatattgaaggaggcaccacaaactcaccttactgcccttagccccagatatcgtcattagcgatatacaattccttccaggtgtttttagtaacccatcagacagtaaatcgttcatcacacccttgcttgaacactggttgagataatttacgatgctcctgtccaaagatgccaaagcagattccccgtcctcataaagaattcgttctattctggatctcatgtcctgaggatctgcaggcaagacagtatatatatcaagtttatttgataaactacaatttcaatgcctcatactataacagagggacatccgtgctccagaatgtaacaaatgaccatggtggcaagtctgaacacattaatgcaatacatactttccagcaagatatacatacctatctgaacatcaacatctatgccaaaggttttacggagtactctttcaccaacattttcacattcttgaagttgcttcgtcctctcttcatccatatcttttaaaataataagatcatcaacgccacaggtgaaaccgtgggtctgaaagttgtaaaaacaaggattcaggatgcaaaactctgtaacaaatgaaaataaaattatcaacaacacgagagcacacctgaagaaagactgtaaagagacgactaaaaacagagagcagatttcctgcagcatttgaaccataaagctcatgcactgtatgaaccagcccatagtcagcaaactgagccttgtcgatcacaccgcagacgaattcattttttctgatgtgcaatttatcttcattaagattctgtttccatgactcgtcaatctctttctttttggtcaaatctccactgttaggttttacttctctagatctacatttgaagaaatcaactggaagtttggtagctttctctacggtgaaaggcgggtgacctttggttatctgattcaacactgcagtgatgacctagcagagacgaataaccagaactcagctcatgagaagtaaaagcatttagtgaacccattgatgactccctagatacagtttgtataccaaaagcacatagccacatgtggaaaaaccaacttatataagaactaagataacaaaacagagcatacaaagattacctgcttcccagtccaaagaggcactggcttcaaaatagcaggcgtgactgtcaacagttctgcatcagaagctgataccatgactttcttgccagatcttccagaaaaagtactgagtaccatgtcagtgacaccggaactgaagagaagctgattaaaatgatctttgtccaaaaatgtgtcccttttagtaagcaaaacggaactgacaatatgatcctattaagaaaatacaaagtcaataaatatcactggtaaacaacccaattcgtgaaatcaagacaatgataaaagcaaactaaaggtttgaagaaatagcatggaagttaaacctgaattaaagctcgaagtggctcgccattagaaggcctagcatattggttgttagcattgacaatattgtaggcctcagcacgtgaaatctcatcttgtggaaaatgcacattcatctcatcaccatcaaaatctgcattgtatgtactgcaaccaaagcaatattttaagccacttttgagataaaagtcaaatgcatgtggaaaataaaccgagacatggtaaaggtccacaaatgtaaatttgaaaggagattgcaaacaaggtaaataatgacatctgggagatccggcattctctatatccacaggagtctacctgcaatttgcatagtggagacgaagtgttttctcccccttcagaacacggaccttgtgcgccattaagctaggtttatgtaatgttggctgccagtgaaaaaaaatagttgagaacataaatttaacatttagcacagacaaaaaggtgtacaccaaacaatgcctgagtccgtattaaatactgaagaaagaaatgaaaaaacgtcctgggaaacccacttcgcaaaatttgagaaacattttatataggcaacattgatgaaataaaacaatatgtgtccacacctgacgattcacaaggacgatgtcaccatctcgcatatgtcgatggacagttttaccttcaaagttgatatcacaagttttcccaagttctgtagtggctcctcgtgaggacagtaattttcttgcaattgcccttcgtgctttttcggtagagggcaacttcattgtagatgatttgtcagagtaatgtgtagctccaggatgaatgtcaggaccattaatgatagcttcccttaacttctccacattccaaggagtcaccctctgcagcaatacatttaactttcacttccggaaaaacaaacataaggctccactataggttggacaagtatctttgtaaatctaaggatagctacaagtcatctccaccaaaagaggaaaatgatgcaaaatctgaaaagaataacccaacattttctccatctaagagtgttgggacgtgtgatttaacagccaaagataatgatgtgtcaagagtgcaatttaccgacatatgacatcatacctcgggatacgtcaatttcaaagcaaaacaaggaggaattccgatgtcattaacagcgatataaggatctggagatatcacagatctgcacgcatgattcactctctttcccatcattttttgccgaaatagcccctctttcttctccagcaattgacatattccagagctgtctctctggctttgaactgcaaaggaaattagcgataatagtcggtctacaccaatacaagatgctctaaagaggctgtcaagtcaacaagacaacagataaaaaagtggggtagccggttgctatacataactagagaaaactaaggaagctctttagtaatagatacatatcaaacaatggcaagaagctaacctgtggcagttttgctatcaaacaagacattgactgattcttgaagattcctccatctgaaaattaccttcgactgatctaatttgttagtacaggcattcccgagtatattattggattctatgaccttatttagtcctacggtttgaggatgttccataacctgaaagaaacaaaatcgtaagagaattatgatcatacatgagttaatgggaacaaccatctgttagtataggagatataaaactggaaaaggaagatcgagagaacatggacagaaagtgacgcacagaggtaatgccaaaagttacaaaattaaaagtaactccaaaaattagagaggatatagaagcatcaaaacattataatttgtagggaattacttacactatcacctcctgttgttggaggtctaaatttagtagggggcacaagaacactctccaaaaaaaacatagagtagtcaattttttcagacccactctgccaaagatcaccaatgaaggagcaaaactcgtgctcattctgccacagatgttttaagatattcctgacctgatacaagtgaataatagcaagacactattacaaatttggaaaattttaaccgtgccttattataaagttaggccatattagaaacaaacctcactcggtaaaaggtctcttttagaattatgctcttcaaactctgcagctacttccgtggacttttctcttgtctctttatcaccatcttcaacttctgataatgcatcaatgccactatcatcaaagccatctggattttcaacactgctagtggacttctttagcttaagccctcgaatgacattagctccaacatcggagtctttcattgctctctgtttaaaaagattgttattgaaaggaatatcacatcttttgctgatatcaaggaggagcataacatagagaagtgaacaaaaaaaaaaaaaaaaaagcagaaacatgctggacatggaaattcactttggcaatccagtgcacacatgttatatataatgtctacgaatagacctttataagggacaaactacagaagtatgagggcaacaaatacattctctacaatccacagaatcaatacaaaaaagtatgaggtcctatatgtgtctgactttgtttagtcttcaaacctaatagaatgtcaaggaagaaataatacgacagaaatgagaaggggtaaataaaactattgtcaaagttgccagatatcaattgtgaaagttatttttcttaagataaaaagaaaatgagaaaacaggaacatactgaacttgatgggatttggctaatcatgcttcctaagacacgtttcatacgcacactaaacaacagagcaagcaccagggctaaatggaacaatccaagacctacaactcccaaagactctaaaagaacaagaagaatgtagtctgttttcgccaataacagaacaaagactaaattctcatttaagcataccataataaaatctgcttaggaggaacaattagaagagaacataccatgcgaacccatccgaacataggcttctcgagtttaggattaattcctttgcatctactacacgactttgatgacaacctcataaaattcttcaagacagcagtgacttcagcaaactgaagagatgtccatctctgatcttccacgtcagaatcttcacattcttcggatgaatcagtggttacaactgattcacagctttcatcactagacttagacttagtgggagtgttggactccaattgcttcgcggaaactatatcacctttaatgatgagtttcagctgagaaacagctctttcaaccttaaattgaaaagaagaaaaaggagcatgaagcacattagaattagtaagtgcagaatgagacgcaacaaaatgaaattaatctcatgtatatcttacatcttccggttttgccataaagtgatgacagaagaaacaggccctctgcaagaaattgaaaagaagattgaagagcaaaggatggtaaataggaaagacaagctcgatatgaccacaatgtcctggacaagcaagtttgagctgaccacatgaattgcaactgcattaagaggacaagaaaagctttagattaagcaaagaaaaaagaccaaacataaacaagattatcagagaaataaagatcaatagctacttgcaaacaaatcggtgtatgaatagctacttccaactaagaatcgacaattcaaagcctagacaggtataaaaaggaggtctttataaaagttgcgtgaaaaaggcgagctattaagagcttagaaaggcatgataattcaggccatggtaaaaggatatggaagaaaacttacgcttgcttatcatctttaggacctaatttaagatcatagagaccaccaggaaaaggattgcccacgttatcgtgtaaaataggactggtaactttcaggaaactatgctttcgaacatcttgctctgtcatgaaactgaatctaacagattcgaccacctgggaagctccctggattcaaaaggaaaaactcgagaacataagataaaccatccaaggtcgaacaccatgggaaacaataaagagcggtgaaaactcaaacacacctctgtggtttgagcgtgagccattgcgtcgtcggtgtcgcttctggaggctgtgtaaactgtgcggcgagattagtgtttcagcaagaacggagacaattagggtttatcaattgatacaagtcgggactttaatcggagtttgaaaacagagagaaaagcggcgcgagcaaccggacttgtgaaggttttttttttcttttgaatcggcgtgaaagggttttagttttagggttgagaaaactaaaataaaaattgtgtttattatattatacactcattaaaaaaaaaaaaatgtgttctatcaaaaatggaagaaaataaaacctgttcttttacgatattctccctgtaatcaccgtcatactgtagttgaatttgtctaatctcagttaattccatgaacgggtttctgttttttcttctcaaaatgaatttttttttgtctaatcacaattaagtcccagtaggattagtctagtcagataatttatgtacatgaataaattctgttttttcttctaaaacgtcttgtaataacatgttttgtgcctaataaattctacactagcaatgagaaccaaggaacaaaacagtttaataataaaaggaaaatgtctaatatcaatcccaaattccaatctaaaaatagaaagttatacaaggcctatgcacttgagaaaaaaaatcccaagggactatagggattaaatcgttgatttgatcatgaccctatacatcaatcgactaagagacataggctgcgtagtagtagtagtagtaatatagtagctgaacaaaacggagttgataatattaagggatttttcatttggatgtcttttttttttggttttctgtttcttataacaaaactgacacgcgcttcttcttgttgtgtttgatgtttggatctgtgagaaccagtttttacttctccttctccgtttctgtttgggaggatgattctgggtggtgattgtcttttggcttggctgggacgactttggctggggtcgaacgctctgactgagacgagcgtatcaggatctgcatacagagagtgatgatacctagaccaagcgccgatatcgtgatacctttccatgaagaaaagagttgtgcccagtgtaggaactttattgctccaagagttagtacgcatgcccatgatagaaccacctgagaaaaagatcaagagatttgtgagtttatagatggaaccaagagaatgttatgaattttatagactcaccgcaagggactttatgggacggccaatgttctgttcttgttgaccggggaaagtgtctgcagctatgtgtttgtctaacagagcatcctgtatcacagagacgagatgagagaataccaaaatgaaagcttttccaagcttttctctatcaaatcttgaccaaatatattattgccaataactgaaacgtggaaataccagtacatccataatttttaccttagccacaaactgatctctgcaccactgtgcaattgcgtcatctgattcaggtaagtctttcatcgagtgacacttgatgtgaacatgcaccttgaaaccagcagcaatggtttgcgttaatggcgcaggaggttttaaaagaaaaaggcttgggatgggatgagtcctacggtttcttacacattataaaagtaaaggtgatataaagagttatgttcgtttcagtaaattggatggtgatgtgatccaagccagtgcatactttgaaatttgttgtgagaagagtgcaagattcaactgctatacgacctattcatatttttgcttgcttaccactgaaggttgtcctttgaatagtcttagcatcgtgggtggtggagaggtttttggaatagtcactgtcatatcataaattgctgggacaaatgaacgcatattactaacagctgacacgaaaccctgaaacaaaaatacaagcaagtctagtaattagggcagaaatcacaataacaaccaccaagtcgatctgatgaaaatgaaacgtataaaggctacccatgcattgagattttggatcatcatagcaatcattttgctttttaaaggacacagagaagatatcaagttgccccaggaatgaacaaaagaaaaatattacaacttactttggtgcgaggaatcaacacatttcgagggataggcaattcagaggaggctgcatactcttgtgcggctttaagtttggcttctgtaaagcgagttccctccacaaaaagggctaaccagaaaggtcgagggaagtcgctcaagcgctgaagacctgactgtaaatttagacaaacacacataactcatggtctggaaatgaagattctgcatttttaggctaatcccctcatgaacgaggtagctgcacgtgctaataagcattttacacaggagcaaaaactaaatgagttgcacaaggatactataaacccatacctttagagtgctttcatccttggcccaatttctttccagaaagagatactccgagaaccacattgaccagcctatgacctgtatgtgtgtgaaaattctgtttatgagtactatgaatatgtaacagataaaaaaggcggagaagtgtattaacctaaaacaatgattttttctcaaacgcaaagccaggtatcaaatttctaacttatagaagagattcagaaatagaattaaagattactactattttctctcaaatctagcaagcacacagcagtaagctaaaatattcacatactggaaggaatttggaagacttcttcattacagctaatgcgcttcccaggcaacctgaccgctgcaaggaaagaaaatatgaaacaatagattaaaagatgtaaacagcataacagggagcgtgttaagagaaaatatgatgatgctatactctctcatatctcatcagatgatcactagggactgtcaccttctacctaagataatctttcttaagtagatacttggaagcaatacatggtcccattgcaagtatacatgctttctcatcaagaagtctattatgttgatctccatttatgcattcaaacaaaaacgtaggaagatagatgaaactgtgaggtgaaattatgtacctgagccagaatccatcccacaagccaatcaatatcacttcggtgattacaaacgacaagagcatgttctttgcctagaaaaaaatagtaggacagtcaatgaagttacagattcgttcttacataggaattttatatcttgaagacatcagaaactgatttgattgccaataagcatatgaacttacccattcgattgaaggtctcattatcagcaaacacttggatctaagggaaaagaaacaagaaatttgagaggaactcatagagttagataagataaaacaaaatccaagcttaacaaccatttagtaaaaaggagaaagcttgtggataccttaactccagcccaccagtcaactatccatacaagctccaaccacaaggtttctgcaaccacccggttaatttttctgtatgtgttcttagacagtggtcgaatgagtacatagcaaactgcctgaaacaacaatatgtagtagtaaacatcaaaactgaagcaaacgaagttgagagaaaaaaagattccttcctcgattcaatcaacatagaaatcaagataaatctgaagaaagtgatacttaatcgcagaatcaaacaacactctatagctcagtgcatgagctccacgagtcaatttcgagcttatactctcatatgcacactcagaattaagacacaatcaccgacaaaaacgaaagaatcaaagtttctggagaaggaaaccctaaaagcagtgaatcaaaacaaaagaagaaaggatctacaatgtagaacaacaacggaatctaaaaagagtaacaccagaaacgaatcagaaaccaaacctgaaagagattgacagcgagaccagatatgaagaagagaaggcccaaaggcacgatgacagctgcagcaatcaccatcctcaaaaaatcccaccaacaaaagctaatgtgaggagagagtacaaagaagaaaacccaacaaatcgttccccgagatttccagaaaccaatgaagaaatattttaccccagatttcaagacaagttgcagaagttttttaaaaggggaaaataaataacccaaccagaaaaaaagagaaaaaaaatcgcaaaattaactttgcgatttaatgggaaaattttgagaagagtgtttgtaactctggatttttattgattgattgattatatacggagatgatcacgaggacacattcgaacacggcagaagcgttttttcttgttattttgattttagcccctctatttgttttcatacttcaaaacatctcctatctcttcgacttggttggattggccaactttgaagttttgaactatgcaatcaatgggcaaggaaaaaaaaaacgtctgtcggaaattgatcggtatacactaccaagatgtgattactcctaattttttaagttaggattaattccctttgcatgtggtaaaaagtgctagctggactttccaattaattataatgtttgtatggtaagcttatatatggaaatgtaacgtccaaatatttcaaatcaacagatttatttcaggtgaatccaaaaaaattgttacataattcttaacactcatagacgaccaccaaaatggttttacttttaccaataaaatggcctagtggcggatcttagaaccttaaagagaatgtaattggagaaaggattaatgtgttacccataccgcttaatatatatccttattagtctgatatgctacttgtcactaacatcgaatcctttgttcatgtctggccctagtctgaaggtgactaatatactaatattaccgtggatgtttaagtgctccactttgttccatatgttttcaatttttccgttcaattcttcctctttttgctattctctagccgatgccttttgtttttttgcttgtaaattaaagcatgacgtctttgtgattctattcacatggtttggtatggttctgattgtttatgtgcggtgtaaagtatgagagtctttcatggtttgtataaatataaactaaatgatatttaagtgcacgtttgattctttagtattctaatatcgaaatttcatttcagtaaagttcaaacattttttaatttttttgttattaaatatttgaagttacaaaagtattgttgaagtggttgatctatctaaccaaattttctttaaatataatgaagaatcaaaacaaactaaagaacaagttcatcatctagttattttcagctgtactatgctcaccgctttattcagattctccaataaattttgcagcaaagtggaaaagataacaaaaaaaacaaataagggttgttgagtttttagttacaattttccctacgtaagatcatttgccttaattcacgtaacatagccacatgctatcatttctatgtgattgtacatattcataacaaatagttgactgccagacaaaatatgttagaaacgtatgcatacaccttttttctttttacaacaatatatatgcatacacttgacgcatccttaaacatattatgatttttctttctttttgtcaatgtggactaaattatccaatttgaaaaagaacaatgggaatcgaacctgaaatactgaggcgccaacatttttacttataattttaaaaatgatttatgtaaaacattgcttgtaagttttaactatagtctcaaaatgacaccagaaattatagttagtaattgctctgtttttaattacttttttctcggttagagactaaatcacttattttgcagatatttttttgcattgtataaccaaacaaaaaatttagttttgttctagtctcctaaattgtagcaaagaaccagtggaacaatgacaaacaaaaaaaaaacagagaaagccttagcttcctaactagttttcaggtgatgtagaaagaactatgaaattagtccgcaagtcttgttgtgagctttttcttggaaggacgactttgtgggatattcaacaacgacagcttgactttatatcttagctagtgttcttcgttttgatcaactgagagtgtgtgaggtcttcaagttttgtcattttatttttcaaagttaagtgtttctcgattagttgaggaataagatatcaagagctagaggggggagatgctgttagaagatctcatcgaacgttgcaatgaatataactgaggagattgcaactgctttagcttattttcacactgttttccaattctcaaaccctatttcgatctctaaagtgatgtctgaatccacttgagttccttaagctactacgatcatctttggcttgtcttcatctttcttctcagtgatagtatacgcacacgcttccagcggcaatctttaactaacaaaacccatggaaacattgatataacgtaaacaggagtcgtttctgcttacatgattcataaacatagcatcatgctgattgagaattctgcaaattatccatcaaactgtagatcgcagatgagacacacatgacgcagagacaatgccaatgccattttggcttcagtctgaaacattaccattcagatttttgccagagacaagcaaaagttcatatatttacttcacagatttttacttgtcgtatattttggatgttttggactttgaatgataaagaatcctacatcattttaaaaactaaacatcaaaagtgactaaaattttaaaagtttcacttctagtttggcgggttgagccaggcccgtgcagtagtgcaacgcatgggcgactcgtggaagcccagatagcaagctatcatagcgggctttctcccttaaaagatagagttaatatcgtgtgagccgatggcccacatatcagatattaaactgataagaacagatactacacttgatcttagccaaaaggccgagaaaggtatgattagaacgaatggctcagcttcttatttatactacaaagcttatgaccaacgatccctagcttgtcgatgtgggacttttaaaaaagggtttagccaaatgtactctttagtcttctcttacgcatatttcttctttaatcaattacatatgaactatcaatacaaaacaatgaataaatttgtcttttaatgcatctttgttctctgtgttcgttgccactgatcacagtctgtgattcacagaactatgtaaacccagaagaagaaagatggaaacttgagaaagaatcttcaaagcaaaaacggaggaactttttctgctctgtgaattgatgcactgatgctctgactcatatagaattgcgttaaacatggcttcatcaatataaggatccgaactatcaatatagtaaatcagtttctctcttctcttccaaaacgtttatgtctttatacttaaaacataagagggagtaacgtttctctgtgcttgtcttgaaacagaggagagtataagagagagtaagggagctgaacagacaaagaggtgaagaattttcaacaacttttgtcttcttctgctctaaaagataaaccttttccaacgaagtcttactccttaatggtgtttcgttgacttcacgttacaacttttcaacacggtgtgtggtcttcaactcgtcattcaatctttggtcattttatcctcaaaagtaaaagaaacttttttttcgttgttgtttgagatggagtggtggaagaagaagagtttacgagccataattaaaagggagagattggtccgaggacacgagagaggtgggacattgctagaagagatcatcaaatcttgcaatggcaaagcaaatcccatcaaaatattctccgctgatcaaatcctagaagccaccgacactttcagcgaatccaatcgtgtttctgaactattcgatgagattccatacgattggtattattcaggtaaaaacaataaccatcatcatcatcataaactgttactcatcaagaaatggagatatagatttagtgagcataacggaggaaacttttgccgtgacatagccatctcatcgattgttagtggtcataaaaacttcatgcaattggttggatgttgtcttgaatctgaacatccagttttggtttatcgtgcatcaaagaaacctactagtttagatctgaaaatggttgtgtcatggagacaaagattgaaaatagcagaggagattgcaactgctttagcttatcttcacactgcgtttccaagacctttcgtatataggattctgcgtttagaagatatcttattggatgatgaagatggtgttgctaagttgtgtaacttctcctactgtgtctctattccacaaggagaaacatttgtgaagcttggtaatggttgtataggtggagattatgattacatggatgataattatttgattaatggtattgtctcggagaaaactgatgcgtttggatttggtatttttatgcaaaagcttctgatgggagaagagagatttcatgagctttgttatgatcggagtgacttgacaacttttgaaaacagaagaaagtttgcaaaatgcattgatgagattgtcgattcaaacatgttagagaaaataggtgatgttacagaagaagagcgttgtcgaatggaagctttcattgtcctctcggaaagatgcattggtcttagaggggaagttccaaaaatggttgaagttgccaaagaactaaaaagattccttagagattcttcttcttcttgtggtgaaacaagtttatagattacatatcacatacttgttatagattatataaatggtttaaaaacagattttcaaggtttaaaacagattagcaagtccaagtttcatttttattctgtataaatttagaaattttcttttcaagatgttgcatatttttgtaggcttgtagccacgtttcttcttgtttacaaatcgttgacttcactttttaatttgacataaaaaaaaaaaaaaactaaaacactccataaaattaattaaaatcagaacatatggtagcatcgtccagtaacattacagtatcatgctcagagcagtttgtgcatcgccattacattcaaaagtctctcacgttttcaccacatcccttgagctgcctctctcactttttttttttttttcagtggaatctttctgtttcaatttagattccaaatattgacaacgatttgtggtggattgtgacaatttaacagattctaattagttttctaatggctgattgaaatagtggcacaattcgtcaatttcaatactattggggagcgatattaaataaaaattattgtagtacaaaaaataaaagtttgaatattcaaaggaaaatgtagacttttttttttgttggtaggaaggagagaatgtagactttttaattttacggagtcgtcgctgaaatcctaaccaatgataaagcgctacgttcacgtgagtctgattttcaattattaacataaaaaataaaataaagatttctggaaaaagcgaacacattgctatcaaacggggctagattggtaaattacgtaattgtctgttagaggagtgcgtcacccaccacggtctttctcaagacaatgaaacgataactaaaataaaaaggagacacgtacttaccgttttgcccacagccgtcacaaatcagattatttactggatttgaattagagatggtactgatccggttaaactcggtttggtcagagttgaagtcttgacttggttttgtttgaagaaaagtgaaaattgatgagaaaaccaaaagaaaccggttaagaagatcaaaccgggaatgggcggcgaatggtcagaaggttaagaaaggtagttaaaaatgagagaatcgaagcagaggaggaagatgacgcacacgagagagacgaccacttccataatcaatcaacaattgctttccttcccggccagccacagatctccgtggccatctctctctttctaattattacaaagaagcattattattattattttaattatataattattgtataatcaaatctctctctgtaagtaataattatcgtataaatcctccccattgttgagttaattagttcttgtaaacccatgacgttttccgtcaaagctggtgagtttttgtctctctctcagcttccttatgtttgtttgaatacgttctgtctctttctcgtgattcttcttgtaacttgtttaatactagctcaaatgtctgatttgtaatcatgtaaataattcttctaagtttggatcctttaatgtatgaaaacccatgattcaatgttacttactcctcttcattaatgtcttcgcatttcaactttgaaaactccattgtttctcggtcaaagctcactgctttttgtttatttatgtttcaataattgctcaattatggttgttgcccaaccttgtgggtctatctttcctttatttcagctcagtttctttgacgattccgtaaattccattactttgtgtttcgtgagcatgtgggttttatgtaatcaaactgcttcctttttctgattctcaggcggtcaactttgaaaactaacaacttcggatttccatcatgttttctcaccagaaatggaagttctcatggtctcagatagccactgttgcttctgtcattgttctcgtttccttggttcatctgtttcttggtcctgtagtgccttcttttgattctattactgtaagacaagctcagaatctttgtggaccaagtaatgaatcaatctcacaagtgactaagaattcaagtcaatcccttgttgttgttgcctttgatcgccgctttcctgctgactcacacggtgcagtagtttatcgtaatgcctcgtggaaagctgagatcggacaatggctttctagttgtgatgcagttgctaaagaagttgacattattgaagtaagtttttttttggtatcttgaaacaatcttgtttctttgattttgttataatggttgtgtttttttttttggtagccaattggtgggagaaagtgtatgagtgattgtagtggtcaaggtgtttgtaaccatgaatttggattatgtcgttgcttccatggatttacaggttagtgtttatgctattttaatcttcctaaacccaatgttgattgctttgtaaatgattggtgtgtaaatgaagctactttgaccggttctgtgtaggagaagattgttcacaaaagcttcgtttagattgcaattatgagaaaacaccagagatgccatacggaaaatgggttgtttcgatttgttccagacattgtgacaccacaagagcaatgtgcttttgtggagaaggcacaaaatatccaaaccgtccagtgccagagtcatgtggatttcaaatcaagtaagttttacctgattcttttctttgacagtctcaaatgcttctcaaatcaagattaaaaactctttaacttaagacatgtattttcagttcgccgacgaatcctgatgaacctaaaatgacagattggtcgaaaccagacttagatattctaacaacaaacagtagcaaacaaggatggtgcaatgtggatccagaagatgcatatgctatgaaggtgaaaatcaaagaggaatgtgactgtaaatatgattgtctttggggacggttctgcgaaattccagtacaatgcacctgcgttaatcagtgctctggacatggcaaatgcagaggaggtttctgccaggtaaaattgtgtatccacagtcaccacgcttgacattttggtaccgagaggttgcatattcataatctaaattttcctaactttgtgtgtgttttaccgccttttcagtgtgataaaggctggtttggaacagattgtagtattccatccactctctcgacggtaggagagtggccacagtggcttcgaccagcacatcttgaagttccaagtgaaaaaaatgtccctggtaatctcattaatctgagtgctgtggtgaagaaaaaaaggcctcttatatacatctatgatctacccccagacttcaacagtctacttattgaggtcacaatccaaaattttagtttttcttctacaaaatgttaaaatcaccttttatgataaagttctcagtctcctctgatttaaatttgttgttgcagggccggcattttaaatttgaatgcgttaataggatctatgatgagaggaatgcaacagtatggacagattatctatatggttcccaggttttctactaaacttgagtcgaataccagataattcagcaattttctcctgaatttgaattgaaagataactttgcctcttctttgtctcttttgattttgaagatggcattctacgagaacatcttggccaccgctcatcgtacaatgaatggagaagaggcagatttcttctttgttcctgttctggattcatgcattataaatcgtgctgatgatgcacctcacattaacatgcaggttgggtcgagaaactcaccttttgattctctgcttgtagaagctttagagctcatatattgtatatgtttttattactttcagaatcatactggattaagaagctcacttaccttagagttctacaaaagggcttatgaacacattgttgagaaatatccatactggaaccgctcagctggaagagaccatatttgggtatgatgatgcatacatacttagagcttgtttcttgatttcttacacagatcactccacactaatgtggctaatctttttacgcctgaaaaaggcagtttttctcatgggatgaaggtgcttgctatgctcctaaagagatatggaatagcatgatgctagttcactggggtaacacaaactctaagcacaaccattcaacaacagcttattttggtgataactgggatgatatatctgatgagaggagaggagatcatccttgctttgacccccgcaaagatctcgtgattccagcctggaaagttcctgacccttactcaatgcgcaaaaattactgggaaaggtatattctctgatagttcttggacattgtttcagtcatgttcgatcgctggaaacaagaagcctgaaagttgttgtcttgttccttattattaggccacgggagaagcggaaaacattgttttacttcaatgggaatctcggacctgcttatgaaaagggaaggcctgaagattcgtaagtcttcaacttaaagactcatgttgatatcatttgggaaagtcgagcttgcttcaaacagcattcctaatggagatgtatataatggtcccataacatctaatgcaggtatagcatgggaatcaggcagaagctagcagaagagtttggttctagccctaacaaagaaggtaagcttgggaagcagcacgcagaagatgtgattgtaactccattgcgttccgacaattaccacaaggacatagccaattcaatcttctgtggtgcgttccctggagatggttggagtggacgcatggaagatagtatcttacaaggatgtgttccagtcatcattcaggtatatagcttaaacttaccacattcaatacattaatccaaaaacttaagctgtctgatccgaaaatgacggtttgttggttcccgttgattgatgactcttcattaggacggaatctacttgccatatgagaacatgctcaattatgaaagttttgcagttcgtgtcaatgaagatgacattcccaatctcataaacactctgcgagtaaccactctctctctgtcttgttctcaactaactaaactgctcctaatctcagactcattttaatctgaaatctctcacagggattcagtgaggcagagatacaattcagactgggtaatgtaaaggagctctggcaaagattcttgttccgagactcgattttgcttgaagcagagagacaaaaagctacttatggacatgaagaagactgggctgttcaattctctaaactgaagcacgatgatatcttcgctactatcatacaaactctgcatttcaagctacacaacgatccatggagacgagagcaagccgtaaaccggactaaagattatggtttgccgcaagaatgtctccataaaaccagctgatcaaaatctaaaacaaaaaagttggaactttggaagtaaatacctcagaagctgcagaagcatatacatatacacacggcagaatcattcaagattcattgccaaatcgattctttttgaaaggaataatcttgggttttgagttaggtgaaccatcagtcattatgtaagcaaaactctatttgttaaattcaagccagtttttataaagatcgtaagttaacaatttattcagcatattatctaatctcttcctctctctttattttgcttgaatatttatatatatcatgcaacatacatttcaaactattcataatcgatctatttaagcttcactcaatctgcacccaagcggctgagcttggtatacctgcatgcaccagaaatatcatatagtatcccggaggagcaatctcagccgttgatggacccaatgcactgactctataagaatttgttagctggtcacgcgtcacagagagtagcttcaagattaccatcctctgattcatcgcaaaggagtgtgtagtgaaagatggtgcaactatcctcacagagagaagatcaacggtcagaaactgagctatggagaaatccacgttaaacaatctcttgtaactcaatactttgtcgcttgtcaataatatcttgggacgtattgggtcggatgtgaaaaatagatatggtggagaataagcctcgaggcttaaatccgttggatactcgacgttggtaaagttgtaataaacgtgaggattacttccaccaactaaaacccgaccgtctggtaataaaatcgctgaggaatggtacatcctaggacgtgatggtgtggacataacggtgaagagatgatcaaacggttgatatatcacaggttggataatcgggtcacgtgctttctcccaaccggccgtgccagctccggctccgtttacgatgatgacgtcacctgttggtaagagtagcatgtctcccataacacgtggcaatggcatggtttccatttcccaacttggactctgatcggatagttttagcctcccgcatgtggaggtggcacgtgtgaatccacgtgagaagccgcctttaggagagcctccacataccattatctcaacttctacgttagcatcgttggtatcatctaatggaaatagtatagaagaaccactgcttggatagttccttggatcaccacctggaatctctggaaactctttcacgattcggttctttttgtaatcgaacacaatggatcttgtgttagcgaagacaaataagtttccatcaggtaaaagatgtatgaacggatataagttgttctcgttacttccatctgaagtttctctaagaaactcaagtcttgagcttctagaccgagaatcatgtcggggaaaaagttcatagttgaactgtcttcttcctccgaccacaatgatccgtccatcgggtaatatttggttggtggcataccatctacgttgggatagatactgaggaaactcaatccaatcacatgtatcactataaccacaagggctaaacattcgagcagcacgctcaccatcgttgtatccaccggtttgaaccaatgttccgttgggaagaaccgcaccagaagaacaccatgtatctgtttggacattcaaaggacggtatgtgttggagacaacatcgtagagaactgagtgtgcgctgcaatcgaacttttctgcggtgtcagtagggtcgtaacgacatatgcctccgggtagagaaacatttgaggtaccgaaatcggtacggtcgaacattataaccatgccgttgtggaggagttgcatgtgcatggcggatataccgatgctcggtagcaacatttcccaccgatcgagttgcaatagaaaagggttagcttgaccttcggataatatggccatggagaggcataagatggttgtagcgacgatgaatgtatttttggagttgatcatagtggttggtggtttcttcctttgttcttggtttgatggtgaattttaagttagaggttggtttatctattttcttgttgaagagtagtatggttggagtaatacgtccaattatatattctttcacataaaattgttatttttattagattgacgattcttgttttatatatttaatttggaattttggacaagcaaactctttgactctactacattcatgccggagttttagacagtctttaagaaaacgtagtagaattgcatcaaactatagatagttttaatcaaattaaaggatgtaatattttctttctaaattctggtatcatcactctttgaaattgtcgtaatatttggaaataaataagtaaggaacacatataataaataagtatgaaatgaatagagaaaacaatgtacacctgcatgatgatttctataattccgcaagttgcaaagagaatgcccaaaaaaaaaaacttaagaaattatcagacaaatatttccttattcttatatgtttataaatcaaaatgacaaaaatatcactcacttacaaaaatatcaccttaagaatgtctccatagaccggctgatcaaaatctaaaaaacaaaaaagctggaactttgggagtaaattgctcagcctcaagaatgtctccatatatacatactcggcagaatgtctccgtaaattttgaattacagcattcaattatggcatgttaacaaaacgctgactttttaaattcagtttagttcttgctttgtgttaagaccggttttagtctcggtttaaccaaattaatttcattacatatttcatgtaaaggtcaaaatggtcattttagttcacctgagctcagtttgaaaaaaggtcttcctcaggtttccccatactcaagtgccggcgaaccctaagacttttgatacctcttctcttctctctcttcgaagatgtctctctcttccctcactctcgactccaatccaagattcgctgttggtggaccttatcaccgccgttatcctcctcttcaccaccctcgaagcttcgtctcttgctctgctaaacgtccagctgtctccgcttcactgagcgtcgccgctgattcagccgccactgagtctcttggacggattggatcactgagtcaagtatctggtgtactcggttgccaatggggagatgaaggtaaaggcaaactcgttgacatcttagcccaacactttgacatcgttgctcgttgtcaggtaaagtttacatttttacctttttcatattccttatgaacttttcgtaaagattaaggatttaatctgtgtttgcaattggagatttgtgaacattttgaattgaatttgttgattcttttactaagtttctgttcctgatttgattgttccggcaaagtttaagtctttttgtttgaatattgtggtttggttaccgtagggtggagctaatgctggacacactatatacaattcagagggaaagaaatttgcacttcaccttgtgccttcaggtatcctgaatgaggatactacttgtgtcattggaaacggagttgtggtgcatttgccaggtctcttcaaagagattgatggtttggagtccaatggtgtctcctgtaaaggaaggattttggtctctgatcgcgctcacttgttattcgatttccatcaagaggttgatgggctcagggaatctgagcttgccaagtcgttcattggcaccaccaagaggggaattggtcctgcctactctagtaaagtgataaggaatggtattagagtaggtgatctcaggcacatggatactttacctcaaaagcttgaccttttactatcagatgcagcggcaaggtttcaagggttcaagtatactcctgaaatgcttcgggaagaagttgaagcatacaagagatacgctgacagattggagccctacattactgacactgtccatttcatcaatgactcgatttcgcagaagaaaaaggttttggtcgaaggtggtcaagctacaatgttggacattgactttgggacttatccttttgttacttcctccagcccctcagccggtgggatctgcacaggtcttggtattgcaccaagtgttgttggtgatctaattggagtggtaagcatcattttcagtcatagacttgactttctgcattggccattatttaacctatgttgttctgagttagtagtattgatgttccccatacatttgccatttactctttgataacataatctgcaagcaatgacagagatatgaaagcattgtgatgatcctgttatttcaggtaaaagcatacactacaagagttggttcaggtccattcccgacagaaaatttgggcacaggtggtgaccttcttaggttagctggacaggagtttggcactacaactggtcgtcctcgtcggtgtggctggcttgacattgttgccctgaaattttcttgccaaatcaatggatttgcatcacttaatctcactaagcttgatgtactttcggatctgaacgaaatccagctgggtgtggcttacaagaggagtgacggcacccctgttaaatcattccctggtgatcttcgtcttctcgaagaactgcatgtaagtaccgttctctgacatatgtctgactgtctccttttatgaatagggcaacttctcttgttattaatttggttataaagaatctgacaggcacatcatttggctctatttgttcataaagtatctgataaagtcctgaaaacagagtttaatcttattgtctaggaaatggtacttattacttattgttgggatgatgaataactttctatacttgtgcaaatgtttgtaggtggagtatgaagtcttacctgggtggaagtctgacatatcctcggtcagaaactactctgatcttccaaaggctgctcagcaatatgttgagaggattgaagaactcgtgggtgtgcccattcattacattggtattgggcccggtcgtgatgcccttatatataaatgatttttagtgttaggcttttttggttcctccacaaactcaaaaattgatcaagtgtcaagttactgagaattattactctctttggaatgactagtgtatctgttgcattgtttctaatattggaatgaagaggaattctgtgcttaagcagtgaggttgctatattcataatgtttaagctttcgtgtttgatcttactctattcgttccattgataagagatccttttatgtcttaaacctgagaaagtcgtgaaggttcattgtagctgctgtttatgcttgttgaatatctgtggatgttatctatacttagcaaatttcttcagattttgatcagtgctggcaggtgaaactttctggtgggagtttatgcatcgtgtgatatgtctctaggttattcagttttgttgttttcttttctcgacagaaagtttgcgttggtcagttcgaaggcgaatcttaaaaatttgttcataccatcatgatctttatttattgatcatgagtttctagtattattgagatattagatgtgatctccatgaaaggggatatgataggtaagcttttttgcattgttacttgcacaaaacatatcattctattagggccgtgactttcacttactatttaaactatcgagctaaaggatagcgaaaaaatgaacatgcttcattaatataccaaaaaaagcgaacaactcggttgtacactgactcactttattgctgcataataaaagactgcactctcactacctatgtctcttttccaaaacgctacactaaatccaaaaccatttgtgtacttctgaatcttgatctaccttaaattgcttttactcaatctaagcttccgtagtagtcccagatggaagggaaggatacatcatcctcaaaatcatagcttccgaagttgctggagtcaaattgcatagttgtggtttcacttcttggcatctcgatcagggtatcccagctgaaattctcagttctgaaaggacttccagtttcttcttgctcgttccatggtggaggggaatgacactctgctacctcacttggttctgcttcattttcatccttcaagattcctagttgctgaagaaactcggtcaggtcgatctctggtttcttctgatcaccaccttcgaacatattgtctgtttctcccttgctggtcttctcatcaagaaagctagtattagtttttgattcggtggaggaagaactagaagaataggattgagataaaagtccagttttcttgagttcttctagtctttgctggattatgtgaacactaggctgagcattcacgtttagcataccacatgaaggaaacatagatataaacttccttgaaggtacccatttgaacctctgagagttactcagagaaggtcttgtattccgctgaagatgaggtaagttgaggtatgcgtcgtgcccatagagtttcaaggcagcctcatcataagccatagctgcttcttcagctgtagcgaaagagccaagccaaagtcttgccctcttcttgggctctctgatctcagccacccatttgccccaagtcctttgcctgactccacggtactgacaaagagcgttttgtggaccgcctttaccccgagcaggacccttcttccattgtttcattgaggatgatttctccatttgtgttgtagtggagaagaagattgatagtgaagaaggaagaagaggatatgataatggagcttagaaagagtatgtgagtgcttaaataatgtcacggttcgcttcaattcctagagaattgcttttttcacccgcgcatgtgaccgttgcttttctcatattctgttattttcaaaagaaaaaaaaaaaaaaaaacttttaaccatttttgatctcaacttcatatttatataattcttctacctaggctcaaactagaataatataatccctagttcttggtgtcccctgcattccaaacagtcgcaatgccaaccttattagttattacacctttttgatgatagcttaagaagttagaacaattgcacacacacattttttttttttttggattattatgttcaaaaatttctgttaatcatcaggaactcaaatgtttttttttttgtttttctttgttatgactagctctaatattttacttgtacatgttaccaagatatctagcgagacaaggttttttgggttcctagaattatttttcttgaggacactttaaagctttaaagcttttacgatatctcatctttatctttttgttgtttccttctttcgtcggagaatcggagagccatgcatgagaaaaagagaggcaagagtcacgagtcgtcgcagcacacaagaatcacatgttcgatcgtgagagtgaagtgacgtgttttcttcattctcgagattttcagatttaagcgccgctcccttcaccattatcccatgcttcttccttcctctcttaccatcacatttaactcaccacattgttccctaatcccatttattttaatagtatatgacttgtacataattctacacaaatcccaaaaaataaagaaaaagtaataactgaacccattttcttctgtttcactaaagcaaaaacacaaactgattatatttctatttcgtttttattgattgtttaatccaaaaaaaggagtgctaagcctaataaatttatctctgtattgacacatttgtcaccagatactaagcttttgctttagccattaaacaattgttcttcatcctaaatcaaaaagcaagctctacctctactgtcttttttttttgttgctaatagtagctagagattccataaccagttaccaaaacatatttggtctttacattttacatgatatttagaatccctgtgaaaactaatccttcattcgctaccacatatctaacataccgattggcacgtgagagaacaaaccaaaagtcccaattatcgcaatgaataaatgggcttagctcattcacaactatgctaaagcccaaaggcccatacaatcccaatcttgttgcgtcgtattaaaccttctccttctccgacgaaacaatcacacactccggcggcaataaacgcttcttcatggaaccaatcccaaatgatctcattctcgagatcttctcgagattgccggcgaagtcagtcattggatttcgtaccttgtcgaagcactgggcgtctattcttcgcagtccagttttcaccgagctcttcctgaccagatcctcgaatcgtccacgtctgctgtttgctgccgaacgaaatggtgagtggctcttcttctcgtcgccgcagccacagaatcgatatgagaagtcttctcatttggattatcatacaaaattctcaggagacgtaagccgattcatttgtagctatgtctcaggtttgctctgtttccctgatttgtggctctcaaaagatgcatcgcctgtgatttgtaaccctaccacaggaatgtatgagagcttacctgatctgatgaggtacaaaaatgctcgaggctttctagggtttgatcccattggtaagcaattcaaggtattgtctgaggcttatccattttctgatcaaagggaacatcatgagattctgacattaggaactgaggaactgagctggaggagtaatatcattagttgtcctgcatatgatcgttctttgagtgaaggaatatgtatcaatggagttttgtattacttagctcagactcttggtgtaccgtcttgtgtgatcatttgctttgatgtaaggtctgaggaatttaagtattttgacgcaggatgctttaatgatcaacttgatgatactagtgggttgattttggtaaactatgagggtaaattaagtgggattaattggaagtatggtcaagctggtgaaaggcgcaccgttgagttgcgtatgtgggttctagaggatgccgagaagcatgaatgggttaaatatgtgtacactctgccggagaatgaagtccttgattcctgcgacttttcagttgctggagtgactactagaggtgatattgttttgtgtatgaaatatacatgtaaaccgttttatgtgttctacttcaatcccgagaggaacactctccagagcgttgaaatccaagattttggagctaaccttgaagcggttgagaattgtggtagagtttatgcttttgttaaccatgtagaggatcttcgggttaacaaagggaagcaactcaagtcaagcatctctcaagtcaagcatctctgctcatgctgtaacaaagtatcgcagcctgattatcattaccaaaaggcttaaaccaaagggagagaagaaatgaaagagacagtagggaagaaaagagacaagggatgaggtaaaaagcagtagggcatgtcatatatgtgtttatgttctttagttatagacgttggaagatctgtgagtatgaatcaaatctagctttggtagtgtattacaaatattttgaagtgaatcgtattgtagcattgttgacctttttttggttaatcaatttttcctatagtttaatgatatcttctacccgaaattaaagtgcaatttctactgtctattaaatttctgtactctggtatcattattttgtattttaaaaagtagctggagattctatacccaaacttatttggtctttgcatttcacataattttatagaatctctacgaaaagttaggccaataccatcgtttgcttgctagcacacatacggacttcattggcacatgagagaacaaaccataaattacgacaatgaataaatgagctcattcacaattacgctaaagcccaaaggcccatcaaattcactgtctatttctttcgtttttttttttttttttccctaaaagttatctttcattcattcatgtcattgtgttcttacaaaaagtgtttgagtggtctaaccacttacaaacctttgattcaaacataacaagatgatcttagaagtaaaacgagaaacatgaaataataaacctgaaacttaacaaagttaaggatatgtcagaaccaaaaaaacatatccaactacttgaagctgctatcctagattccctgtagtcttcaacaaaaattgacagaagtcttgttagagtggttatctctttttgggaggtttcagactctctcccattcttgaagcactgtgtagacgagtttgaagtctaggatcctctgcttctcttcttacttcctgtcttcttgaggattgaccgacttcaaagactctgttgttatcatgattaggagtgtctgctcttgttggagtggtactagaactcgatgaccattgttgtcttgcagtactagattctccaacatgtaatgtatgagtatctctaactgatgcatagtatggatacgcagctctcaattcttcaggattcagtggtggatgagcaattctaggaggcggtgtcacaggagcaggaaatgaagtctccgtcatctgcgattgagagttcaagcttgacctatgaacactgtctctgaagacagctctttctctggctatgctgtggggacgtggtctatagggacaataagctctgttgtgcgtaaacctgaagcaactgctacagattcttctgaggcgctcatattgaaatctgatggtaaccacttctcccgaatcaaagatgattcgttggaagaatctgagcctgtctgtgatgccaaaacgcactctaactcggatataagtaatttgagtagatgttgcgtcatgatgatccagcatgatgacttctcctaagtcacgtgctatctctagagccgtctcttcacacacatagggcaggggaattcctctaatctgcacccaaagatcaatagaagtaacaaagttaagagcaggagcaggttcccatctttgagtagccacgaaccagttgttgaaaatccatggttctcttctttgtactgactgcaagtcaacttcattttggaagagaaattgaacataagttgcatccagaattcttccatggacatgcaccgtcattccccagtaccgaggtaaggctgcaatcaccgcgttcaagttttggactcttgggttgagaggtcttgcaattatactcagtcgattgaactcttcaacatacacataagcttcatggggaatgaagagggctggatcctcaggacctagatccaggccttgaatttcatcccacaattcatctgccatggaggtaagattgaaaagagaaaaggaacaagaaagactgagacctaatgacgtaaaggagtaaacacttataatatatagactctaaccttaatgaaaaaattaggaaaaaagaaattattaaaaaactagactcgaagaacctaagtggaaatcctaaacttactaaacctttgactgaagaaaacaatcattagaaaaggacaaaaactaatccacctccacacctaacattctatttgattaacaactcagcaattaatctgagcatctaattcccaaagatgacacctccgactgatttgataatctgagttaaaccacctgtaaccaaatcaagcctccaatgaacactgtcacaatctccctagctgagtcatttcggaagcaaagagatttcctagccaatggggaaaaccccgagagacataagattgccatctgtgcccagtaataacactcttagcaatctcaaaagctcctttattacagtgttttggttccaaagccatgaaccaaccacttttcttttgtgataacttcaagagttgacttgtatggcctaataatgatggccattcttctggtttgtagagagctttaataatgtcatgtgttgaggctctgaaagtgactctgtcaaaatgatgttgtgccatgcttgtaagagcccattcccaacttctaatctttgcatccaacatagaatgaacatgagaataagatctcctactatgaagtaacacctttcccagagcatctctcacaacccaagatgcaccagaagcttgtaaacgattagaccaggccacaccaatattgcatttaatctcattctgaggaggaggactccaattcaactttgactttgattccttgatacagacatcttgttgggctgaacaccattgattacaatccacataagctttgtctacaatgctttgagtcacagaagtaactccctcaaacagaattttattcctatgtttccataagacccagattatccaaggactaacataactcacattactagaactactcagtttctgacaatagttcaaaacatggtccatattagtaaagattgaagatccaaaacctttttcaggggattgcataagggacagcgcccagacttgtcttgccaatggacattggaataaaatgtggttaattgtttcattctcctcattacacattaagcatccatccattgccttgataccacgagttcttagtctgtcttccactgctacagctccttttaagactttccataagaagaccttaattttaggcgccgtatgaagactccaaatactgcaaaaaagagggtttactgaagggttcactgcagcctcttgataaatcttttgatgagcttgtcgactaatcagatcataccctgatttaaccgtgtaaatgccattattattgccagaccaacaataagaatcatttcgatttaccatcggtctttgattaagcattatcagaatatccgtccaaggaaataactgactcataagattcagattccagtttccagaaatggggtcaatgagttgattcactttcatgctaatatccatcaaagaatgaatactcgaaggtcttctattcagaccatcaaaaagccacttatcaacccaaacaatggtttgttgcccattgccaataatcttttttaaacccttctgcaataagtcacgaccatacaaaatactctgccaagcatacaaaggacgtgttcctttagaggcattaaggaaatcagtattgaggaaatacctgcttttaaagatcttggacaaaagactatcttcattcttaaagattctccatgcttgtttggctaataaagcttgattaaagcactgaaggtctttaaaaccaaaacctcctagagatttaggcaaaattaatttttgagccccaatccagtgaatctttttcgtattctgcattgaattccaccaaaagtcaatcatagcaccagttaaccttgagcatagagatttaggtagcctaaaacaagtcattgcatacacagggagagccatcgcaatagacttcaatagaatctctttacccccctgggataaagttttagcgtaccaacctatgagtctggcctgtaatttttcctttaagaactcaaataaatcctttttcgaacctcttaagcattccggtagtcccagatactttccatacccaccttccaattggattcctgatctattcttaatccaatcttttgtgtcctcgtcaattttggctccaaaggtgacagcagacttttccaagttaatcacttgtcctgagatatgtccatactctgataaacaatgcataagctcttcacattcattctttgtagctttacaaattatcaaagtatcgtcagcaaacaataaatgattgattgaagtccccgcctcattaaaccttattcctgttactctcccatctctttctgcttgatttagaatatgcaccaaagcttccgtgcacaaaacaaaaagaaaaggggataaaggatccccttgtcttatacctctttcaggaaacaatttaccaaaggcttgaccatttatcagaacagaataagagactgaagtcacacaactcataatccaagaaatccatttgatattaaagcccatagctgttaaaattccttgtaaaaaaggccattcaaccctatcataggccttggacatgtctgttttgaaagccaaaaactctttggaaatcttatcattagttctcaaattatgaattatctcatgagcaatgagaatgttatcagaagctaacctctcagcaacaaatgcagattgggttggggagactaactctggaagatgtttcttcagacgagcagatagaatctttgacacgatcttgtataataccgaacacaagctgatcggtctaatatctgccattcttcttgggggtgaaatttttggaatcaaacatagatgtgtgtgattccattgatctggcatgattcccgtttgaaagaagcccaagatgtcctccattatctgcttcttaactaaagaccaatgagactgaaagaatagagcagtgaaaccatcaggacctggtgcactctctgcatttatagagaataccgcattgtaaatctcctcctctgatacatctttagtcaagtcaatattcatttcagaagtgactcttgcttggaatccatgtaagattgattgcatattagcaggataggacgaagtaaagagatctttgaaaaagcttaaagcaatgttgcctttctctttagctacagtatgttcattcccttcttcatcaactaaaaagcttagtgagttcttaactctattagccttgacagaagcttggaaaaatttagaattcttatcacctccatctaaccatttgtctctactctttaacctccagaaagattcctcttcataaaaggcagcacttaaaagatcttgtaacactgagactttaggccaagaaggaaactgaaaacttttttcctcatccagctctttcctcagacattttattctgttctgagcattgaaattattcccctttttccatttaccaatggctttcctgcactccactaatcccatcattgatgacgacacttctgaagaaacaatctcattccaagaagaacgaatagcttctgcacaattaggatcatctgcaaatcttttatcaaaatgaaattgaccacgaaagacttcctgatcattcacaaactttacaagaacaggcctatgatctgaacccattttttcaagaaaccattgatgtgattttggaaacatagaaaaccaagccgaatttccaaagcatctatctaatttgcagtgaatccattgatcattacgagttcctccccaagtgtaactattccctgaacttcctaattcatgcatgtcacaccagctaagcatatctttgaatggttgaaaagaagaagacagtctagaagggcctcctaacttatcttgattagatgtgatatcattaaaatcacctatcatacaccaagttgatttcctgaattcaccaatagagcataacttgtccaaaagcaaatatctgagacttgccattggattcccatacacacaagaaacaaaccaactttgagaaccttgaatcactttcaaatccaaaagattcttgtcttcatacaaaaactcaatttctaggttatttttccaaaaaagagcgagacctccacttttgccttctggttctattgtgtgaaaataatcatatccaagccaagtaaagattttcataacaaaaggatcacaattcatggtctccatgaggaacaaaatatcaggaaaatgatcttttttcatttcctttaagtatcgaattgtccaaggattcctcagtccttggcaattccaactaaggacgccctattgatactgcggcagttcacaaggaaccaccgtagagtccacacccttattatcttgagaaatcccagaaccaacagcttgatttcttcttttagcatctgtgtcaccttgaacgatgaaatttgcatccggaagatttaagtcttctctaccaagtgacttctttctcaaagtgtaaactttcctttttcttggatttttctgcctaatacttaaccctgacgaacttgcttcctctaaagtagttttaggatcagaagataaatccatttccaaaaatccagacaaagcttcagattcatgactcttccttagtttagctttgaatggaaaaagacctctctgtaattccttagataactcattcaaaggagcaggagaggctggataaggagaagaatcctgagcatccttctctctctgccagttaaacaaatccctattttcattacttccaacaggaaccatagagggagacggaagagatagaatcttgggtctagtttctgaaactaattctcctgtctttaaacctgcatctctgataattttttcaaaatttgatttatttctttgctgagaaaacggacaatcacctttctcatgagtcagacgttggcaaagaaaacacctcttcctgattctttcataatcaaaagtaactgagacaacctcaccagttggaatcagaacctctttacaatttcgtaaaggatttcgaacatcaaacagtacctgaactctgacataatcctgagcttgagacttttctaagtctaattccacttttaaaaccttaccaacacaagacgcaatctccttaatcgtatcagatgtgtaatagttgacaggaatattccgcaatcgaatccaaacaggaagaaacatcagataatcctcttttggtttctccacccatcgatccattatcacacaccattcatcttgagtccaaactccagtttttaaaatttcaagtaaatcatcttccgatttaaaaagaaactgaaatctttcttgtgaaagcgcaacacctcgaacccttgagtaaagtctccagattctgggcatgtccaatatccaattagacatcctttgatgagaagggttcagaaatcttcctaaaagactgcagttattcctttctattgagcaaaatttttcttgattaggcagaatcagaggaacatcctccatgatggacaattcttgtatggctttatccaaatccagattcatgatacacaaatgagcaagaccctgaccttttctaagaagaaccacttcgagaaaaccaactgaactgacagactacaccacagcttgatagaactgaactactctgaaaacaaacttctacaaagaagaaaaacggatgaaaccacgaaacaaccttgactagcaacaaagccgacagaacacggagaaatcttcggactgtggatccactctatcccagacagaactagtgtagagggagaagtttttaaccccaagtggattgggacggcaagagatcggcgaatcttatctttctgattgggacggcaagagatcggcgaaacttatctttctgaatgagctgctatgaaagagaactctgcgtttttttccaacagactcacatacacaatctataaagtatgtctatttctttcgtttaccggacgaatttagaaagaacaaaataaacagtcacaaattccaacctgtcgtcgtcgtagccccaaaccctttctttctccggcggaacaatcacgaactcaggcgaatccgatggatagaggaaaaatgaatgtatcactcccaactgatctcattcgcgagatcttcgcgagattgccttcgaagtcagtggctaggtttcgtacactgtccaagcagtgggcgtctatacttcgcagtactgatttcaccaagctgttcctgagcagatcctcgaatcgtccacgtctcttgtttgctgttgaacgatacaaatgtaatgagtggcaatttttctcatcgcctcagtcacagaatcggtatgagaaatcagctcatttagagtttcatagcaagttctcaggagatgttagccactacatttgtagctatgcctcaggtttgctctattttcctgctgtgcatatcgttgatactgagacgattgtgatttgtaaccctatcaccggaatgtatacgggcttacctgtgatcatgaaggacagaaggtctcgaggctttttagtgtttgatcccgttgataagcgattcaaggcttttgatactcatttcattctaacattaggatctggagaactcaagtggagggaaaagaatatcccttgtcctctgtatgagcgttgttcttcgaatcaagggatatgcattaatggggttttgtattacttagctaaaactgtcttagttgaaacagtttttggattgacgtttttgatagttcgctttgatgttagttctgaggagttcaagtttattgacgctgcccgctttaatgatcgtctaaaggatcctactagattgagtttggtcaactatatgggtaaattaggtgtgactgattgcaactgtgttgacgctggtggaagacgtaccgttgagttgtgtctgtgggttctagaggatgttgagaaactggaatgggtgaagtatgtctacactctgcctgagaatgaagtccttgcttcctgcgaattttcagttgctggagtgactgctactggggatattgtcttgtgtatgaagtatacatgtaaaccgtactatgtgttctacttcaatcccgaaaagaaaactctgcaaactgttgaaatccaaggctttggagctaagcttgaagaggttgagaatcgtggtgaagtttttgcctatgttgactatgtagaggatcttagtctaaacgatgcgaagcaactcaagtcaagcatttctcatgtcaagagtctctgcccctgctgtcaaaagttagtgcagcctgaaaacatcggggaagtggtatgatgatggtgtgagtagggagaagaaatgaaagatacatcagtgaagatgaagacataagaagaagagaagattataagagagtaaaacgatgaggcaaggaataagaaaaaagccatagggcatgtcatctatgcgtttatgttctttagttaatagtagtattataggcgttggtaaaagtctgtgcgagtcaaatctagcactcgtaaaatcgtacgtacctcttgactatctttggttaatctagttttcatatataattccatctcttcagttctaaatcaataaaacatacataattgtagagtttgatgctgtctctctctagcacattttttgccttgttaccatcatcaggttgaggtctctgcaactcggatccatctgtgaagaacaagcgcagcagaacaggtatgagtattttgctaacctagagagtggactggtgttgatttgagtttctaatctgatctttcccaaattaaaaaaagtcaagacttagtttcagaaaacacaaaatggtagctgcaggttcaccataactggttactaaaacgtatttggtctttgcatattacataagattatagttaggccatcgtttgctacaacatatctacataccgacttcattggcacgcgagaacaaaccaaaagtggcaaaaaagaagaagaagaagaagaacaaatggctttacaacggcgttatgcatgccaatagcttagcgcagacttcacgtacgtctcgagaagggtctgacaaagatgctttggacagaactgatcttgcttcgagcaatccctctgaaatgttttccagtatcacgtcttcactcgccatcagtgatgccattagttttgcgccagccagcttttcctacgcaacaagagaataatgtttgacttccgcataaccttaaattcaaggcagtcataaatattcgagttcagatgtggatagatgcagacagtttcggatatggattgtgggattcagaaatgtcgacagtagtcacttgagaaaggaagtttcatgtcttaatgtgaagctctttgtctacttccataccattgtatacatgttagaaataagtttaatagatttctggtaccttttcggatccttgttcaagaaatctcagggaaagcttcagcagatcagatgaaaccggaagaagtgtggacttcagatgatatgtggccgagaataagacctggatacaagctgcacggacctccggtacagatatgacctgcacaaaattaaggaattttgttgaaaactaaacaaaatgcaaacaaatttagccaaatccgaaatgagtgtaagcagtcaaaaagtaccttgagggaatgaataagaggcggaagagcttttcgggcaaaagtcttcttggaagactcagggtttttttgacaagcactgatgataacatttgccatgcatagacgaaatggaataggaagaggattttcacaagttaggatatcagtactcagctttgggatagacgagcagttacttcggtcttctattaaacaatggatagtgtaatctaggacagaataacctgacgcatcaacacctaaagatcaggatacaatgtatacacaagtctggaaaagctattgttagacaacatcaatactaaccagatgtgtccttccctgttgaacgtattttttctcctccagatgtttttgaagatttaagatgttgcagttcagcacatatcatcagtgccagacaatcaatgcacccatgttgtactttggaaactgtaaggaaaaataacagccatgaagtgaggaagtgaaaggtaacagagcttgagatataaatcaatagccactagccggtgtcttactttcatcttcaacagaaggccataacaaaatattttccaggactttcctgatcttaggtgttactctgtgtgagagagactcccagcctcggacctgcaagtgacggaaaacttgtaatttacaaaactaatccaattgatagtgcatcgaacaagtgacaacagggatcacagaatatgttcattaaggacacgaaaaattaaatatattaccataagagatgtgcatatagaaaataggcaagctttaatcttgaggctgtcttgtatctctgtggccttttcgagttgcaataaaacagttggaaatagcacctgttgagtaaaagtgccgacatattacaaatttggatgatgaagagtaggctagactgttgtataagtaaaactgaagtaggcatttagaaaatttcagatataagaaaatgcaccaagcccttctccatactaacagaacctagttatgacgggagaaaattttgcatgtgctttgctttcgcatgaagatagcagtgaacttgacagaaaacttattaaggagaatctaccattgtttcttggtatataaaatttactttgaaacaaaggcttaaaacatatataaacatttagacaagattgaccaacaatacaagagcaaggaaggtagtcaattagcacctggggatggagacgtccacataactcagcagagagtttccgaacttcttcaaattcaaacttagaaaatgccctgtattactagagttagttcgctagatataaaataagtattagggtagattgtatttgatgatcactgagagtaaaataacctttccaaaatgaaagtagcaatgcattgacaatcctcaaacttgatgtcttggtagtctgataagtaacacatgacaagaaatagatgtagtgaatcaagtctaagattgtcagtatctactcttgatcatgccgcttaggaaaatatagctaaagcgttgaatctaattgagaataaggatcaaacgaccttatgataaatatccaatcctctcttatcaggaaaagaaaaccaaaggcataagcatacttaccattcacagagtccccgctgaggaatttaccataaattgtagaagaatcaatatcatcaaacactctttggggaagcagtcttaatataagcagtgggcaaaggtggtcaaatagagatttctccgatttagttttgtcaactgaacttttagtatcagatctggatatgaagctcgcatccaccctaaattagaattgacattatagataatcaatattgttttatctttgggagtcgttgaaagtttttcttaccacagaaatcacaattatggtacgtattgtacttacttgttttgcttcttcatatgtgaaagtacatgcggaaggaccaagtccgacgtatctgccaaagattcactgatgcaactaagaaacctaaccatgatggcattggatggctccaagaacatcttgtcaagcaaaggtccgatcagtgagttccagttttgtacctgtaagaatttgatttcagtcaacaggcagaaatatattctaattgcctaattatagctggcacaagctttggtcactttggtcattcccatgcgaagagtttcccagcacatacacaagaaaacaattagataaaaggaaatagtactggaagggaaaaaagggacaaccaatgcctgaaaaagtttgtgttgaaggttcagagttaatagttcagttaccattttctattcagtagtgcaccaacagttcgtaaatggtgcctatacatgcactttagaaacaaaaatggattgatttcaaagatagcaaagcaagcatgacgtattcttgtacttacacttctagcccactctgggatcagctttagcactcgatcactgtcaaaagttaaacctgtaacagtacaagaagatgatgagcatgccttgaccaagaataacttgatagtgtccgctatgtaattcagccagactagttcatatttcacatcgtttaagtttcacattccagtaattttatttcttatccagcttaaatttgaagtgttgtaataattttatataatacgttcggattgtacatatataagacaaattttaacacagattctgtatcgcatgtagcctatggtaatgaaataagaagccaaataccttcagtggaatgtccattactttctgcagtatccaaagcttggatattactacaagagaaaagtggagatcaaaagcagaaagcctttttcaatattagcttgatacaatgcaaaaccaaaattaaaaaccaaaccaggtagtcaggtcaatattttcacgtatgagcattcgtaagtttacttttacaaacttgacctaagaatccagtgtattctcacatctcacttagggtaaatgggaataaacaaacaactatgtatacaatggggaaaggagaaaaagagacagagcacgatacctaagactggtcagcaacatacatataacatcaaaatcctccttatggtgtttcaggaccccaagcaaggtttctgtagctgatgattgtacttttccattgggtgcataaatgaggtttactaaattcggtagcacaaatgatggctctggaagaaaaaacgataacaaaaatcattcagttgattggcttcattatataggaaagcagaaaataaatgttatccaatatgaactataactgccattgcaatatggaataacaagttttggaccccataaattggatctttataagtttttctcatctgaataatgaataattaacagaaatcctccttttaacaaaacactgattattatcagcaaaattcatcttatcaaatgaagaaaggccatatttagaggtcataagagacataagactgccaataccagaaattaataatggccacaaacaaaagcttccaaatgaatagcggataaaggctaaaagaagaccaaccgattgacttcagcaactctgaagtttgtttacagatacatgtttcctcgtcatcaaggcactttaacaagcagtccgcaatctctttcctgaaataagagcagaaaatgattctgacttctgaggggatgagaatgcaaataaagaagatacagaaaagctagaaatagaaaattgggacgaaaaacataaatgattgcataccagggtatatgagaaggaaatgaatcttttgacataaggattacttctgatatcacatccaaagaattc

SEQ ID NO: 501 - DNA, 95643 bp, Arabidopsis thaliana
gaattctgaaaacgaatttgaatatcgtattctaacagtgaatattgcatttatactaaaatttacgatcatagccataaataagtagttatgtatagtcaaactatatgtagttatgcagtactttaagacgtttgaaccgctaagattcccataatctgcatgataatataatgtatgtaaactgatacatgcacaattgcacatgataaatataactaaattgatacatgccgatttgcgcatgataattataattatatgctctataacatgttaggatttaaaatgaaaagagcaaatggttcaaggctgcaacttggtgacgccaccaaattgttgtatgtaacaaaatgtctctagctttgatgagttaatctgacacttcttagaaagagatgcatgtgctaaattgatcacatcaatgttactaaaaattgctctctacagttataaggaaacttgcctctgattatgcagctgtataattctactttctattctctctgatcgaactattgacttcttttcacctaacctgtatacatcaagaaaatataatgctttgcgagaagtataaagaagaccaaaatgcattaacaggcacacatttatattgacctttccttgtataggatggggtatattcgtttgatgccagctagcgttttaggcactggacccccattgcacttgatacaatttaaagccagagggacaccaatttctttaccttgaggaaggaagagattataaacgatcaatggaaagataacaatatgaaagcaataagaactcagatgatgtagtgaggcccacagcataaagctacttacagaagcctagtcggtccgcccagtgagctctgtatgtcccattaatattcaacaacaaacagattgtacttgaaatcactgcctgaaagtttggttgaatgaaactcttatgaacaaaccaacctgagaagatatcagaaaatcttataaaatgcaaagtctaggaaacctcaagtggtgatgttggggtagcccagccagaaagtcctgccccgaggatcttcagataagagataagaacgtaagcatgctgcaagtcagtgatctaaccaaaatctgtgttgcaaaacaaagtatatcttgcatgaaaataacttactcgaagcttctgcccgacaaacaatttgccagcattcagctgctttgttagtacgacatccagagcagcattcatcgagtacctgtgatttttttaaaaaaaatcatatggaaatgagtcaagaaaacaggtaacagaatagcagtagcaatttcataccacccatcagtgagttctactttcacattgctgcaactatcagaacaatgtgcttcctgagaatcattatcggtctttggattaatagctgatatgcagagcaccatcattgaagaagctggagcatcaccactcagaatcctcttgattgcagagcaatgaccatgattgacctctctctcatatctattaagaaagattaaccatgttagactttgcatgagtttaagtaacgagttgtgttgtgagactgggaaacctgtattttagttcctcaagaacattggtgattgtcagaaagtttcctctgcatttggctgggtagtatatgtcgtagcatgcaagtttccagactatccacctatagtgattagtgacccacctagtgcatacgtagtgatggataagttaatagatatagacatcaatactcactgtctatctaatagagtgacaatcacatgcaagcttcaaaagaacggtcacacactttttctgatataataaacaaataacacggttaacatttcaagggacagagaaagtactttctggatgcatgttgtaaggaagcaccagactcagccaacatttgaagaaaagtttcagctccaaccttgtttgaagaagactcatcacagaatacatatttatctgcattacttgatttgattcttctgacatggtctggcacataatccatctaaaaaccacctcgtaagtgtgtttgagtgaatgaagaaaaaagctatgtaacgcaggaacagttgaaagggacaaaaagaatttaccctggtcgtagctgttggatgcattccaaaaaagtccttgatatatactcttggagacttttctggataccttgtagaaagcacctttttggaagtaagtgtatcacacgatacaacagacaaacctgataatagacaggacaccaaaactataaacctgagaaccaaccaattagattaacataaaaaattcttaaaaaaattaatcatatatattaccacttgaagcttgcagagcatgtttctttgaaggagttttaaaggatgaaatccttggccttttgaaaggagaaacggagactgtctttcccagccttttcttttgggtactgtcttgtttattgtatgcataagctgtatctctgcgatttgttatatcaacaagtggctgatcagcaggccttccaggttgcctacctcttggaatgaaaccgtttaccttggaattattcactgccatatctgatgccaaagacctgttatttgatagtccatgtgtagcattcagagcacaatcggtctcatcaacagccgcatcaaatttcttgatcaaattaccccctgaagctaggttctccaagttgactgaactaaattgctttgaagatgaccaaagaggagatacaaaactatttggcgtatgtttgttgcttgtcttttcttcatgagcaatataacctctgttggcacttccattgtttatagcaatatcacttaacctttcatctttctctggtgtaaaaaattgatcacctccagctacatcatcaaagaaagaccctaattcagggtcaccaagaaggtttctggcacgttttaacgcctcagctgacactgacaatgattttccaccagcagtctgaaactttgttggaggcacctttaaagatggatttaagacttcagatctcttcccagatacataatcctcatattgtcctggagttcctgaatgatgcttaactactgtagcatcaaactcctcatgagtttttaatccggaccacccatgttgctgggaggaagaagacgactggttcacatggttaaatccattcaaatcatcttcttctagtcctaacaatgccttggcccttgctaaaccggcagaagatacattaacctttttgttggaagctgtctgaaaaagactgttggaaactccaaatccactctccctgggaagaacgttgtctacacaatcaaaaagaatcttattaacaaataaactatgaaaaaatgtcacttctaatattcatcctctaaacgaagtaagatgtgtgttgattagttcttcactattcatcatttcatctgataacaaccaaactcaagaacctggaagttgaacggagtagcagcacaaagaacaagttcatatgtaaacgcgcacacagctatactggaaataagactttaaaaaagaggagataagaacacacctgagtcaataatcttatcacttcctagaatagacatagctttggcaattgaagactctttcaaagggacagatttccccgaggccgtcctgaacattggcaaagtttcagctgtatccacttgtctcatttggggaattgagcaatttgtgttccgcaaatctaaagtgtagccaagaacatggaacattcaaaagattttcaggaaaccattttcaccaacattaagtaacaattcaagggaattcagaaacaaatgactagtcaagggaattcaatactgtcacataaagtacctgagtaagtaaccttctctgctaaaatggatttggctttagcaatcgaagactctttaagaactacagacttccctagcccagtcctgaacattgggatttccccaggcatcgcttcttcccgtgctataagcttcgagcatccttgaagcatcaaataataattcaatctcctttgagtcacatgacaaacacgattcgacaaaaaaaggaagaaacgaagaatcaccttggagcaagagatcggccatagaaggtagaggagctgtcgattcgagcgccttggttggcgtagaatccgagacggactgaagaatccggccagcgacttcccaccggaaaccatcgccgctggaatcgggaaataattgccacgtcgacatttattcagttctagagtttcgaatttttccgactcgtcgttctctgattcagccggagaactaaacctcgcgattcagaattgcctaccacaccaagagtcgggagtgcggaaattttatttttatattttctgttttctttccccccaaaaccatcaccaaaaatctaaaaagttaaaagacggcgggaaagttgaaaacgatttgggccgaaattaactttgggcttggttttaacgacataacgtctcaagacaagtgagttaatgccacggccttttattgaggtaaaaaaggcacgaatgctaaccgaaaatcgttccaaacaacaattgcttacgtggacattttaaaacatctgttcaatggtcattggtgactgacttcaatgaaaattacattgcaacaatagccaagtatcacagaaagttacattgcaacaatttccacgtcaaatttctaaacatgcagaacggtaatttacacggggaaggcgctgaggaggcggagggtgctacggaggggatcgcaggaacaccgatgaatgagaagaatccagaggcggcatgatcttgctcgtcgaggagagtggatgatgctctataaacggccaacaatatggtcgacgtacacctaaaatgtcttgctacgtggatgcaccactaaacctttcaacttttttgtgttttcttttcttaattaaacacaagattaattaggaaatcttgtgtttcgttccgtttcgtttcgatttctggtttcttgtttctattactcaaattattgctcgagtgttaggtttgcttgtatctatccttgttttttccgtgattatgtaatttgattggcccttgtagtcgagatgtttgtagccttgatggctcggggaaactcagagagagagttggtcccggttgcattctccgctgtcttactgataccataaacaccgtttgatccatgattgcctctattgtatacttgatgcttcatgatatatgcattctccatgtctctgtttcatgtttacgcataaaaatattatcaagcctcaaacttgaattcggttcaaaatcctagacatccccaagaggatcataaacacagtttagacttgtttttcaattagcaaacagttgcttgataagaagtcattcctacagctcatgtgtaacacaattctctctcttttctccaacaccccaactaaaacaatctaagccgtttctgaatgttttccggatctgctgagtcataaatacgagtgctttaggcaggcaaataagactccagcatcaatttggctggggaaggtgttaaaatctctacgatcaggtacgtgtatttccattccttctctgccttgtctttaaacatctccgtgtacactttccctgctccttgaggcccacggatgtagaagtttacctgaagcatattcaattttgatcatgttaaacctgcaaaactctagacaatttatatagcaagaatgtgaatccaagcgcaatagaggttctacaatgaaatacctcaacatgctccactccgtcttcatctgtaaatactctgttgggtatacgttgacgagcagctcggtttctagtttcttgtccatagcctttgatgggggatccaatcctaaccctcacctagttaacaagacaatcacagtcacagaaattgtttcattttataaacagatgcttttgtttcatacaccacccctccgctatgatcaatctgtagagttagtttctaattacctgaccatcatcttgaattctcttcaaggctttgtcaaagaccttgtacctagaatacataatggtgtctttagattactcaaatccaagtgtctgagcagataaatcaaattagatttctgaagcctcactcttttggttgaaaaatgagctctttaaacacaccgtagccagcagctccagcgacaccaagcccagccagaataacaagactgtaggacgcaccttctgtaaaggtcaccggcttctccgggatgtggtatgtaggagaatcaaaaggatcctccacagtcgtcacctctttcttagcctgtaaaacaattggcaaagcaagcatcattattagatgacagaagctgtctgtcgcttttgacggcttgcgttgtgataaatggcaaacacataacgtagacattaagtagaaacttgtaggaagaaacaccttattctgctgattcccaggttcttttgaagttcttgatgcaaaagatctggtaaagtaagatgagttgatgttctttggacgagcttccgtacatatacttgcttgcgggtttcggaagcgaaacaatagtcctgtataacagacaattgtcagaacaacaaggtacacatcaacactaggatttgaagtttgattacacaattatcactgctgaccattagctccagtagagtcctgcataagaaaaacgatgagaggtatgagactaacatataagcccaaaagggtgtaaagagcaaagaaaatgttgtcgaagcaaatatttaacaagtaaagggaagaaaatacctttgaaagaaatgagttgctaaaaaccctcttggactgatatataacaaaagtaacactgtaagttttccccagatcaaggacactagagagattcaattcaaacaggactagagacactgaaaaaaacgacctcaattttcacaagatcctaaacaatccgtgtctatgtagtagaagaaccaatagcttttagccaatattatatagaaatgccggcagagtgagatggaatacgaaagccttaccgattttgggattccggaacaaggttgtgtagcggaggaaaacgacgccagtttcgattttgattggcggccgatggctatcgctgatctccttaaaagattcatcatcatcatctctgaaccaccaatattactgattgaaaaatcgaagtggagacgacgacgacgacgagcgaggttgaatgagcaaggcaaagccgctcgccgttgctggggttttatcgtagacacgtgacgcgcacgtgcaagctatttccttgggcttgggcttagactcatgagataaagcaaataaaacccaaatgggctttttagaaaagaaacccaaataacagagtatctcttcttcttcttcgtgcaacaacctaaccatggaaattgcaatttgcaaacatggcgctcgcgctctcgctgtcggcatgttctcctccactccgccgcactcgtcgtgccggttttcgaacaagctgctcgatcttcgcgaatccagcacagcgagccaagaggaagctgcttgagctgatctccgaggaggatcgaggtctgagaacccagaaagaccccaagaagcgagatgaaatcgtgaacgccatcgaatccatgacggttatcgggcgcagctccatcaccacagacgactctctatctgccacgtggcggctcttgtggacgacggagaaggaacagttgttcatcatagaaaaggcaggcttgtttgggacgaccgccggagacgttttgcaggtgatcgatgtgaataaacggatcctcaataacgtcatcactttcccgccggacggggttttcttcgtacgctccgatatcgatatcgcttccccgcagagagtcaatttcaggttccaaaaaccacttcttcttcgtacgctctgatatcgaaatgtgtagcatcatagcttagttgatagcgtttttgatattcagattcaatagtgcggtattgagagggaagaactgggagctcccactgccaccatttgggaagggctggtgagtgacttctctctgtttcctcttcggagctacttgtatagataaagagagtgagtttgggttttggttccacaggtttgagaatgtgtatatggacggtgagatcagagtggccaaggacatcagaggagactacttaattgttgatcgtgctccttataactggactgaatcatttgtataatttgtgatgctttttgcttcttgtataagttatacaccatttctgtctctctcctttatcattgggcctcaaatagatgatgcaggaatatagggaggaggaggaagaggaatttgaaggatcattcaaagtgtcatccttgagtttatttagggtttttgtctgtgtttgttacaaacacaccacccacattttctatgcccttttttaatgttattttcacaatccatgacttaaaaggccaacactaatcctttgtctcttatttcattgtgaactcacaaagatgttggtgtccgcaagggtagagaaacaaaagcgtgttgcttatcaggggaaggcgacagtgcttgctctcggtaaggccttgccgagcaatgttgtttcccaggagaatctcgtggaggagtatctccgtgaaatcaaatgcgataacctttctatcaaagacaagctgcaacacttgtgtaacttccctctactttctttgacaactttttttctttgagcacttgtgcaaagataagcgtgtttgtgtgtcttggtgatgttaggcaaaagcacaactgtcaagacacgctacacagtcatgtcacgggagacgctgcacaaataccctgaactagcaaccgagggttccccaaccatcaaacagaggcttgagattgcaaacgatgcggttgtgcagatggcatatgaagcgagcttggtttgcatcaaggaatggggaagggcagtggaagatatcactcatcttgtctacgtttcctccagtgagttccgtttgcccggaggtgatctttacctctcggcacagctgggccttagcaacgaggttcagagagtgatgctgtattttcttggatgctatggaggtttgagtgggctgcgcgtggccaaagacattgctgagaacaacccagggagccgtgtgttgctcaccacctctgagactaccgttctggggttccgcccacccaacaaagctcgtccttacaacttagtcggggctgcactctttggagatggagcagctgccctgatcatcggagcagaccctacagagtcggaatctcctttcatggagcttcactgtgctatgcagcagttcctgccccaaacacagggggtgatcgacgggcggctgtcagaagagggcataaccttcaagctaggaagagacctccctcagaagatcgaagacaacgtggaggagttctgcaagaagctagtggcaaaggctggctctggtgcgttggagttgaatgaccttttctgggcagttcatcctggtggaccagccatcctgagcgggctggagacaaagctgaagctgaagccggaaaagctggaatgcagcagaagggcgttgatggattatgggaacgtaagcagcaacaccatcttctacataatggacaaagtcagagatgagcttgagaagaaaggcacagagggagaagagtggggtctgggcttagctttcggaccgggaatcactttcgaaggctttctcatgaggaacctctaaatgtatatgaactggacatttctcaacaaataaaatatacaggaaccgatgctaacacacatacatcatgtaatggttgcattagttttgttctttaatggtaaatcacagaaatacatcaatacagtaagtttatatacataattgaagtattcttcaatggcatcttacttcatgcatccaaaaagtaatttcaaccttacataattcagatgtcgttttctctggctttcaaagattcactcgattctagcaaaggaacatacgtaacatagtgtgacacactagtctatatatacatttttgcaatatttttaacaaataaatcatagagttgagacttatttacaactcaatgctattgacattttattattatcaattaattaatattcctaattattaggatttccttatctaatatatctccatcaattctaattatttaaaaaaagagaaattttaggacattattaatattatactttattaaaccttaccaataaaaaatatatactttattaaaggtaaatattttagttatttaaagtttattaaatattttcacggaaaaaacgtttagaatatttataatatggaaaatctataaaattaaataaacatttgaaagaaaactttttaattgatttaaattataaatcttttaataaagtattattaaaacaaaaaataaaaaataatgtttaattacaccgaactggattagatggtataatgggtttagaatattataatatatgaactttagaacaattaaataaccatttgaaagaaaactttttaattgatttttgaattataaatcttttaataaaagtattattaaaacaaaaaataaaaaataatatttaatttcaccgaactggattagatggtataatgggtttagaatattgtaatatatgaactttagaacaattaaataaccatttgaaagaaaactttttaattgatttttgaattataaatcttttaataaaagtattattaaaacaaaaaataaaaaataatgtttaatttcaccgaatggtatagatggtaggacgggtttagaatattataatatatgaactttagaacaattaaataaccatttgaaagaaaacttttatattgatttgaattatatatcttttcgattaaagtattattaaacaaaaatgacaaaataatatttaattttattgatcgggtttagatggttaggacgggtttgagtcgatagaaatacaagacgatatatcatgggtgaaatccataagatatgtttgatattcactgaacgagattagattgtaggacgggtttgagtcgatagtaatacgagacggtataccacgggcgaaatcatatatataacaatcaaaatacaattatattatcttaaacactatacaaaacaaacaatattaacaaaataaatataatttaaatttaaattatttagttataatctaaattttaacttaatggacggtatgttattgttcctatatctttaaatagtaaaaatcaaacaagtaattatacagtaaataatatataaaaataagagttgtacatttagaaaatataaaacattaaatcatatatattttaatctactaaacaaattaaatttataccgcgggataaaaactagtattatatgttagcgaatcctactaaactatgacaacaaatatacatgcgagtcgtatacagaattgattctcacatttaagctgtcaacaaaacattcaacaagtcttaagcaagccattaaagaagggacctgaacaatttaatatatatggttaactatttaagtatcatgtccccacttgtccattacgtgattactacaaaagttcacataaaagttcctttttatatatataggaaagggaagaagatctcaataacacaaaaccttttaaactagtaaaatacacagattttaggatgagccaatgtgttccaaactgtcacatcgatgatactccggcagcagccaccaccaccgtccgctccaccacagccgcagacatccccatgtacataccttaatttatcatcttgatagtataagtggccacaatataatgatagcttttcttgtttgtctacagattagactacgaggtagccgagctgacgtgggagaacgggcaactaggcttgcacggcttaggtccaccgcgagtgacggcttcgtcgaccaagtactccacaggcgccggtggaacgttggagtcgatagtggaccaagctactcgcctccctaaccctaagcccacggatgagctcgtcccgtggttccatcatcgctcctccagggccgcgatggcaatggacgcgcttgtcccttgctccaacctagtacacgagcagcagagcaagcctggtggcgttggctccacccgggtggggtcatgtagcgatggtcgtaccatgggcggtggaaaacgagcaagagtggcaccggagtggagcggcggcgggagtcagcggctgaccatggacacttacgacgtaggtttcacctcaacatcaatgggctcgcacgataacacaatcgacgatcatgactccgtctgccacagccgcccacaggcaagtcatcatatatattaacttgttctagttattgatgtctctagctttataagtaaatgataataattaaggaaaaacgatagatggaggacgaagaagagaagaaagccggaggaaaatcatcagtttcaaccaagagaagcagagctgctgctattcataaccaatccgaacgtgtaatgattcactcaaccattattttatttttcaaaaaaagttttatgttattcgtctactgttacacatgcatgaccccctgcgttttatccttggttgattttattacagaagaggagagataaaatcaatcaaaggatgaagactttgcaaaaactggttcccaattccagcaaggtacgcaagtcgttttacataaactagtgtacgtggctaaataaaagtcatatgcgtacgtatagtaaaaaaatagatgctagctaggtatacatgaaaatagaggggataatatgaaaaagggtggtggaccaaagtgaagtgaatgcatctaaagaaatggacctcatacgatgattctactccacacacttatgttcatcaatctcttatttgcttgtcccctaaaaacttattttacatcactttattacttggtccggttggtccattcatatacacctttaattattatatgccttgtggctgtcgactcaaaaatcaacacaatctacattacacacatgctccgtaacattggtttggttaattatagtagataccaaagaggcttgatatataaatcgttaattttggaactatagacggataaagcatctatgttggatgaagtgatagagtatttgaagcaacttcaagcacaagtgagcatgatgagcagaatgaatatgccttctatgatgcttcctatggccatgcagcaacaacaacaactacaaatgtctctcatgtccaatcccatgggtttagggatgggcatggggatgcccggtctcggtctcctcgaccttaattctatgaaccgagctgctgcaagcgctcctaatatccatgccaacatgatgccaaacccatttttgcccatgaattgtccatcgtgggatgcttcttccaatgactctcgatttcagtctcctctcatccccgatcctatgtctgcctttcttgcatgctctactcaggttgaccctttttctatatatagatatacaacttgggtctaaacaatgcttcagtaccatttatatttttatatatttggaattgcagccaacgacgatggaagcgtatagcaggatggctacattatatcagcaaatgcaacaacaacttcctcctccttcgaatccaaaatgattattactcaaacacctctatatagtttacgtctatatatgtgttagtcacatacatacatatatatattccatcataattatttatttatatgtataggcttctcatgaattatgatattatacgtattacgtactttaaaaatatgtggtcgtaattggatagagaaaaataaataatggttatgtttgagtgaattagtaacatcactccacgtctccaccacatccacaaatgaactccaaattttctagatcaatatacgaacagtagataatccttcgttttcacgaatttaattatgtgactgaggataagtgaaaagtggaaatggagtagacacaatagcatatgctttgtctgcaaaattccacaataatttgttgataatgttattgaatttatttataatgctacaagaaacaaaaagaaagcgaatgtttattttttaaaggtgctgtaaaatgattgggtgttaacaggtcaacttggccccgaccattaccacacgtttgtgagtgaacaagtcatattattattaataacgaaaagtgactcgaaaattcatgagaaaaatgccaaactcaactactcaagtaagtataagtatactgtttacactatatagtaatcaatcgtcaccacaaattaagccctatatttgtcgttttactaataaacgaacgtacaaatacaatatatcactcaactttgatttagtttgagatgttgtgtgtacttaattacataaatgaatttgtgcatgcgacaagtattttcggacatatccatatatatacattttcttgcaatgtataatacgatacgaagagggagaaaatgacataagaggaaaagaaatcaaatcatataactccaaaggtcgacaccagttggtttgacagttaagtatgatatatacactcccaaaaatatgaaaacggtggttgccatgttcgtacaaaagttaagaataatatatatgctattttttttaatctattattcacacataaatgtatttttttaacaccaaatgtaaactatttaaatttcaaaatacatagtgtgttgagcagatatattgaaatttgtagtgtaaaatgcaaaaagttgaaagctaaaatttgcagatgcataatgtgtagtattgatttgtttttcgtcaaaactgaaaaagaaaaagttgaaatttgagatgatgtgatacatatgtcacatgcatgtgtgtgtgtgtgataggtttaaaaagaaagtaaaagtcaaatgttggttaatgcgagattcctttcacaccaacaaggcaaatacatgagatgagatggtcactgtagctaagagaaatagaaaacgagtatcgccgacgcaaaaaaggcttggccgagacaaaaaggcccaattttactactgtctaagaagaagagcatcgagaatttacaatgggctcaagcccaggcccgttttaaatagactcctattgattggttagcaagtaagaccggttccaatttccggttgggtattgagttggtttaagttattagccgttcgtcgtcttcctctggagaaagaaaaaagagaggaaacaatggaaaatcgccatctcccttccaaattcttctcctctgcttcatccatggctcagaatcaacttatcgattcgctaacatctcacatatctctgtaccactcccactcgtcttcctcttcaatggctaatactatccccaatcctaggtcggcgatcctccgatggttctcttctctcagcgtccaccagcgcctctctcacctcaccgtcgttgatcccaagttcgtccaaatcctccttcagatgcttggttatatccgcactaaaggcccttgctctttcatcatcctcccagacctcccttcctcctccgatctccccagtctctgctttaaaaaatctcgtggcttaatctccagggtttccgagtccaacgagtcagagcgtttcgttttcgactctactcggctctttggttctggagaaggggaaagggctcaagattgctcttgctccgtcaattccctcgattctgtcgtcatggccgaggaatttcttacaaatgtggatcgtttcgtggagactatggacgtcttatcggatggagcatttctgagaggagaagagagtgatttggggtccaattgggtagaattagagtggctcaaagccaaaggctattatagcatggaagccttcgttgcaaataggttagaggtaagcatgagattagcttggctgaacacaaatagtggcaagagaagaggaatcaaattgaaagagaaattgaatgctgctgctgcggctgccaattcgtattggaggaagaaggcctgtgttgattggtggcagaatttggatgctgcaacacacaagaaaatctggacttgtttgtttgggaagtcggctaaatctgtggtatgtgttttggagggatgtagtttatattacatggaacttcatagatttgactatagcaaatgatgtagatgttattacatggaacttcatagaaatgactatagcaaatgatgtagccaaatcatggctatatgctgtcaaggggtatcatttcgagccaacaaaatgattcactagtataaagatctaactaaatattcccttatctagagtgtctatacaaatattaaattccttgtagatttaggttgcttttgttttagtgtgaacttgcattctggaagtctctgtcatcatgtgagctctgccactgttccattacatgttatacaagtgtgtagatgctgtttgatttgatctaaatctctgctgtcactcaaatccagatatatgagattcttagagaagcaaatcaagcacagcagggggaaatgtggctcttcaattttgcaagtgcaaggaaagggcgtacagacacttctgcagtttcattctgtgacatgattttggaaccgaactctgtaccaaggaaaccaataaccgtagccagtaatctaagtggcttatacgttcttcaagaatttgcttcactgctcatcttatgccaaaatggcttagttccagtacatagtgtatttttcagctcaatgggtactatcacaaccttagtggattgcatcttaagaaaactacgaggttttcttatggtaatctctattgattctgttaaaagtgaacttcttgacgacaacactcacaagtgttctccaagctcatcatcaaatcagaagcttggttcgaccaaccgtaaacagaaaggaaagaccaggaacatgaaaaagccaactccggaggctaaatctgataaaaacgttaatttgtccacgaaaaatggaaaggtacatagattctatccatccgcagattatttatttctgtatggcaacttgaatttgatctttgatatctccagaaagatcaagctaaactggaatttaacaaaagcagagaagcgatagaatgcaagaaagttcctacagcttcgacgatgatcaatgatcctgaggcctctgcagcaactatggtgaattattttctttcctcatattttggctgaattgaactcaggttgtttagaaactgataatatttatcaggaagttgtcccagggttagttgccaggaaaggaagaactaagaagaaaaggaaagaaaagaataagagtaagaagtgtacaagtttggaaaataacggggaagtgaataagtctgtagtgaatagttcagccatcgtaaaagcttccaaatgtgattcaagttgtacttcagccaatcagcatcctcaggaatatatcaatgctcagattattgaagagcatggttcatttagctgtgaaaggaatagatcaggtacttgtgcatctgtgaatggtgcagctaattgtgagtattctggagaggaagaatcgcatagcaaagctgaaacgcatgtgatttcatccgatttgagttctgtggatcctgccggtggtccaagctgtgagaacgtgaaccctcaaaaatcttgctgtcggggtgatcgtaaagaaaagttgacaatgcctaatgaacgatccagaactttggatgaaggggaatcccatcggattcaccatcagagaagagaagcaggttacggttttgcctccagcagttcagaatttgtttcttatgagtggcctgctgtagctcctatgtacttttcgcatgttagttctcaccttccaactgcaactgacagactgcaccttgatgttggtcacaatttgcatccatacgtacggcaaccttttgtgtccactgtgcaacatgctagaaatccttcaattgaaggttcccacaaacaagttctctctcgacccatgcccatgagtctagattggcctcccatggttcatagcaattgcggcttgacaacagcattcacttgcaattatgattctggaattttggtggacattcctgaacagaaaaataagcacgagctggggaatgaatgcgagaataactggatgttagaggaagattttgaggtgcacactgtttctggagtagactataatcaatatttcggtggtggagtgatgtattggaatccttccgatcatctcgggactggcttctctcgccctccttcccttagttctgatgatagctcttgggcttggcatgaagctgaaatgaagaggtctgttgatgacatggttgcattttcgtcttcttacagcgcaaatggactagattctccaactgcagcctcgttctgttccccttttcaccccttaggcccaccaaatcagcctctcggttatgttgtgccaggtaatgaaatatctaccaaaatactgcaagctccgccaacaacaattgaaggtgcaggtgaagaggaagtctccggaactttggctagtttatcaggggatgttgaaggcaattcaggagactcacttccttatccaattttgcgccctataattatcccaaatatgtcaaaatctgaatacaagcgtagttatgatactaaaagcccaaacgttccacctacaaggcgcgagcatcctcgtataaagcggccaccgtcacctgtggtactatgtgttccacgtgctcctcgaccaccacctccttctcctgtgagcaactccagagcacggcgaggttttccaactgtgaggtcaggaagttcaagcccaagacattggggtatgagaggctggtttcatgacggtgtaaactgggaagaacctcgtggagcagagattgttttgccctggagaaacaaaagccttgcagtcaggccgatcattcagccgttaccgggggccctcctgcaagatcacttaattgcaatgtcgcaactaggccgagaccaagagcatgtaagcaacgtctttgatatctatgtatagctaaattctgcctaaattacgtttgtctataatgctaatttacagcctgatgtggccttccctctgcaaccacccgagttattgaactgtccaatgcaaggggaatctctctcactgatccacggtattcttaatgacgagatagattctttctgcaagcaggtaatcacaatacctcttttttttctccatatgctttagtaactgcctttagtttgcagagaactatatgagcatctttgaagtgtgtatttacttttcttgggatggcgtttcttctaatcctttgaattatatactgctcgcgaaggttgctgcagagaatatggcccgcaaaccttatatcaattgggcaatcaagcgggttacccgatctctccaagttctgtggcccaggtctaggacgaacatatttggttcatctgcaactggtttgtctctcccttctagtgatgtggatcttgtggtttgtcttcctccagtgagaaatttagtaagcaaacccaaaatcattcctcgtgtgcattacttgttgaactggaagatctgatatataatacccgcctcaggaacctatcaaagaggcaggaattttggagggtcgcaatggtataaaggagacttgccttcaggtatggttagtggcgcaagtcatgttgcaactgttgaatgtctttgggcttggcagatcttgttcttaaaatctatatttcgttactcttgaaatgggtagtagtatacaatcaagattctgttcttaagttttacatttactttattttgatgatgaatacgtgcttgtatatttttgtattaggcgctagtctaattattccatatatggttctatttttcttaatatgtggttgctcaggtcatgttatatatgaggtaacgagaattgctttagtattgtgtaagcattgtaatttactaatttgaataatgcttgagccgacattcaactctacttctttttctttcttagaactgtttttatcctgttaagtaaataagagtcctatatctgacagttcacgtgctgcattttataactgaatccactttgctacatgtttttgctattcagcatgcagccaggtatctcgcgaatcaagagtgggtaaaaactgactccctgaagacagttgaaaacacagctgtaatgcgtcacttattgatgtttttctttatccacgattgctagtacttatcatgcttttgttgatatgatccctttatgcttgtgtagataccaattatcatgcttgttgtggaagtcccttgtgatctgatatgcagtatacagtcaccaaaagatggtccagactgtatcaccgttgaccaggatagcaatggtaacactgaaatggttggatttgaagactctgcagcagcaaactctttgccaacaaacactggaaacttggcaattgcaaaatctgtccgtcttgacatcagtttcaaaactccatcccatacgggtcttcaaaccacgcagctggtatttattttattctgttttccaaatccagatttcttttttccttacattatactctcttcgtgtgtatgtatctctgtaacctttttccttcttttggctcttgtttcctaaagtgttcttttctgcaggtcaaagatctgactgagcaatttccagctgccacaccacttgctctggtgttaaagcagtttttggctgatcgtaccctggatcaatcatactctggcggattaagctcttactgcctggtgaggtgtattcttttacttaagtaatatgttcttttcttttggattttaggcggcctgtctctgtatgtttaatgcatatcctggtaattggtacttgtcttatttaacactgcgacgttcttggacagaaatatctatccacactttttaatctaatccactgaaacatgttccaatatttgtttgtaaatcttagagtataattattgcaggtcttactgattacacgttttcttcagcatgagcatcatttggggcgctctatcaaccaagtacgtaattttcttgtttgcttattctttgtcacaggagctatcttgtttaggtttcctttttatattcattcaattactaattgaaaagaagtattttgcagaaccttggggggcttctaatggattttctttacttttttgggtcagtcaaaatggttactgataatttacagtgactggtatctctcacaagagggtcatatgacgataattggtaatgtgggcttgcttgttttgcagtaatgtgtttgatcctcgccagatgcgtgtatcagtgcaaggaagtggtatctataggaatcgggagaggggttataggtaaatatcgcagtcctgtcaaacttcaagtgaaatactaacttttattccttatgttatcctcatgtttttggttatctacatatagtattgatccgatacacattgatgatcctcttttcccaacaaataatgtgggtagaaattgcttccgtatacatcaatgtattaaggtgagttggatcttatatgcatttatcaatgcttttatctaaaaaatacaacgatgaagaagttttatgatagtaaagatgatttatttgtgcaggcattttctgaagcttactctgttctggaaaatgagcttacatgcattactagtaccagtgattcgtgtgggaagcagcagctgcacaatttgcttccaaaaatcatcccaagtatcatttcatcttaggaaccaaccgagatgtctttcctgtacgtgttgcttcacagaactattttgttgcgtatttagtatgaagaattggataggtagattaatgcaactctgatttccctttagaagctgccttctttaaccactgacctcatcattctgtacgaaatgaaggtggagttgtgataactctggaaggtagaagctgctgatgatgatgatgtttgcaactgccgtggtggttattgcgaagataggcttccgcaactaatacctgagttgcatataatccctcccatggtatttgcagataatcctcagaaacccttgtttttttgtgttgaacattagtttggttacttaacttgctaggttgttggtgtgtttgaagcacaagtaggaaaaatgattatataggtgacggtgcttaaagaggaagagcaagtgtggagactgggggacattagagaggtgtgttgttgttagtcaacaacaatgactagctaatttgaaagagaattgcagaagtaaactaattttgaagaagactttttgcattgtttactaggcatgggacggcagtgatattcgaggtatgtacaaattatctctattttgcaagtttcagaaaacttaaaaactaatatgtattatttgatcaggaatgatgatgttggcgtgtaagtgggattgagaaaggcaatagaatgatctcttcttctttttcatccccacagttgggaatccgaatctctccatatgtttccatgcactttagaagaaataacaacaacttttccacaggttaagtttatatatacagtagtaacaagttaatgaaaacgaataatgatgtacatatgcgtttccgatataaattattgtctgccaaagtattgggataatctgagtgtgggctgaaagtaacagaacatagtatttctatagattagaagaaccggaacaagcccattggcaacagtatccggtatgattataacattgcagtagtggtatgtcttggagaatcgaggagacactcatcgagtttaaatgtgtggtggagagaataaaagtgtgcagatttacttaaagagtgaagggaaggtgctataaaaaaggatcttgttggccacgagcttcttccttttcgtcttctccgccgcaccctttgggtcaacagttaaaccctctccattacgcgtgtgagtatacacatataatattcacattatataagattatgtttcatataacgtagatcctgcctgttctatatacaacagattaaatggttttgatatgagacgttagatactttatttcatctggtcaactgccttagctagaataatttaatgagtaacaaaagcaaaatggtcctttatgttagaattgtggtgagtaacacagcagtttcgatgctctcacccatcatccatactttcaaatttgggaagccatcaaagtacccctgatcccaccacttcctcagactcgtgagagagaatggtccgtgtgttcttcctttagggatttcatagaacaacaacagttgctctggatcatactgttggtgatcgcgactgttcatgtcctcttcatcatcatcgctcagttcaattgtctctacttgatatgattgagtttgatgttcatcatcgtctgctgttttctgacacaccggacactatttctttgtcaatatccatggtttcacgcagttgacatggaagttgtgcccacagttcaattttccaaccccagctctcttctgaaacccatcctgtaatcaattgacagtgaggatatgaacgcatctcatttctataataatctttctgaaagactcaatctggactttaacctgacagatgcaacatattttatcggcaagagattgaaattcggagggtttggtgtttcgaagacaacggtctatgttgcttgcttttacaccagagttctcatagcccatattgttacacagctgtagaagttgctgtgcagagccaaaaaaacacactcaatgaagatgataagataaatttataatgttttgtctgctcttgcgatattgacaaacatacctcgtatgtcatatgatcagtatccatccttaattcttggtagggatcagtatccatcctcaaaccctatatcaataccaaacatacagaaactcaggatcaaacaagcataaacccaattcaaatccagaaataagaaggaagatgctcttagtacgactgcaataaaaatttatatcatattaacaacaatttagctatggtttaattcacagcatataaaaatatgaaaaacctctcatttcttgtacataatttttagaatcaaacctataatatattaggaaaatttaaactaaaaatgtggatagtttggtcaacaagagaggagccaggcgaatatattaacaagtgcgcaatgtgcatacattccaaaagagttgggtatcagatcctttttctatgaataacttcattcatgtcccgttacttttcccttacccttgtttctttcgagagaggggaactacaagaagcaaagaaaaaatcgaattttcccggaaataaaaacaaaatttctgacgatagaatgaaaaggagattactttttctatgtgcttgacaaaataagaagctaagaaattaggtagtttaagaatcaacgaagaagaagtgaacaagccagtgaaatcttgttcccttatatcgatatccaaccttgagaaactcagaatcaaacaagcataaactcaagtcaaacccaaaaatatacaaaaaccctattctattcgagtaaacccttattagaaaacaaaaactaaatcgatatgaaaccctaatctattcggaaaaaaaactgaacaaaaactagcaaaaaaccctaaatacctttggtcgcttccggagctttttttttcgttttgtggcttgattacgtcgatggaggtggtctgtataaccttctgccgatttgacttctttgattgacatatcgaaaataaatggaaagtaattattacaatcatacatgcatgtcaaataaaaaaataaaataaaaattccatttatttaatataatgttcgtttgttttcgagatgtaatacgaacgtgaactagtcaatgggagctaattgagaaaaaataggaactaaaaattaatcactaacaaacttcattttaattatgcaaaaagaaaatttaaagtgtccatgatttattttcctagaaaaggcatagcttaatacaaaaaacaaatacctgcaaaatcttcatcgctactgttaacagtttcttctcttggtgggattttatttaaatcaaacaaaaattcatctccatcatcactataaacagttttttctggaatttcatttaaatcaaacaaaaattcattctcttcacttagaagtgacatactcaaataaaaatttggaattgtgaagaaaattagaaatcatttttttttaaaaacttacataaacatgaatgattcagaaaagttttagtttggctccgatgtaaaatttttgaaattttttgtttaaaattaattatgtaatggttgcacaaaaaaaataatcaattatgtaaaaagttgctccattttttcaagtaatttgggttgtttgagagtttaatgcgtaacgtttaatattactctttaattgttttaattactttacttgattgtttttattaaataatagttttgttaattactgtgctaaacctcaaaacatctgatatattgagtaatttatatatccaaataacctaggagaccaaaagtctattaggttaaatgaagacgagttctagaactctcataaaacctttgaaaaaagctattaaaaaaaatctttttttttttgagttatatatcttgatactgtctagcctaattatcaatgcttaattttcgtacttaaatactatcatcaattcatcatggatttcagagcggatactccaatcttctttgcattttatcttttttttaccgtttaaggttaacataaaaaaaaatatattctaaattttttttttactgaaaaaagattctattagaaatctaagtgcaaaaaaaaatgttgattgatggaggttaagatcaaaatatgaattttgtcttcttgcatattaaaaatctaacctatattttacatgaacgtaaatagatgattttatgagtggcaaaaacgaactcaccataaaaccattagtaacacatgtagtacaaacccaatattgaataggaaccgtactacttttctaattatttaaaattgcaggagtggtatgtcttggagaatcgaggagacacgcatcgagtttaaatgtgtggtcggagagaataaaagtgtgtgcagatttgcttaaagagtgaagggaaggtgctataaaaaaggatcttgttggccacgagcttcttccttttcgtcttctccgccgcaccctttgggtcaacagttaaaccctctccattacgcgtgtgaatatacacatataatattcacattatataagattatgtttcataacgtagatcctgcctgttctatatacaacaggttttggtatgagacgttagatactttaattcatctggtcaaatgcctagctagaataaatatctttaatcacgttcaaaattgattttatacgaatacacttataattaatttaattatgatatatggtacttgctttaccggccttcttgtaaccttccttcaaactctagctgctcatcaattgaattaacaaacaaaaacaaatccaagtcaagtgatcttaaatccagctcattcttattcacgtgccatgcaaaatgatgcatacagtatatataagggacacacacaaagacatgtaaatattataccatccaccgattaagctacatatcctctcagttaattctctaattcgccatggcggctaacaacaaattgttctttgtattactctccctgttccctctcatcatcttctcggcaaccgccacgtcatcaaaagactacgacacgaaggcttacgtgcactcatggtgccgaacaaccttatacccgaaactatgcgtccggtcgatgtctcgttacgtgcgttcacgcgcggtgcaaaatccacgggatctggcccgatttgcgctcaaagccagcctatatagagctaagtacacaaaggcgttcttgttaaaagaggttaagaacttggagacgacgttgaggccccaatactacgcgtcggttcacgactgcttggaccaaataagagacagcgtgaaccagttgagtctagccatagcggagctagacagagtcagcaggagacagggaaagagccaaggggatctacactggcatataaataacctgcagacgtggacaagcacagctcttacagacgccgagacttgcgtgagccagttcccgggacgtaggatgagcaaacttaaggctacgattaaaggaaaagtgaagaatgtggaggaaacaactagtaatgcccttgccttcatcgagcactacgctgctgctaggtaccgagccagacgtccttaagctgagcctgtgtgtgtgttttgatcattttgccttaaatttcttcttacttcttgatatttgtgtgtgtaattgttaaccagtcgtgtaaatccaaaagttcatatatgaccgtaaattgatataattcaataacaaggaaagttctaagcctaaaacaagcaagaaaatacctttgccgtatacaaagattattaccattattatcgacatcacagaatgtagcccgtctagctcagttggtagagcgcaaggctcttaaccttgtggtcgtgggttcgagccccacggtgggcgatagtgttttttctgttgtttttgtaaagagctgaagttataaatgggctttgaaattaatgggttcgaacaccaacggtgggcctttttttctttctatttttgtaaagagctgaattttaaaatgggctttgaaattaatggatcagtgaggttaaggcccatatttctaataaaattagaagtagttacaaacccgacccgacccggttacgtgtatgcggagatcactctcctctccataagctaagctctagaaacaccgcctttaacgtctcgctgcaccatttttcatcgttgatcagtcgtcgatcctcttgagtgatttgattttagactttctagttatcaaactcgaaagatggattctgtccttgtagtgggcattgcatcggttattctcggtgcgttgatcgctgtactcttcttcggtagctacttccggaagcggacatcggaggtgcaatccatggccaaagcggagcctcaggatccgatccggaatccaaagtcgaatcatcctgctccgaagaagaatcatcccaaatctcaagcgtccgataaggtaaggttttaactccattttgttccgagtttagggatttcagatttggatatgagttgactttaaagctttctcttcttcgtttctaaattgcttgtggaatgcagaatcagaacaaacggcatcatcctttagatttaaacacgttgaaaggccacggtgatgctgttactggactctgtttctcgtccgatggaaagagcttggccacaggttagaacctataaacactcctacttagctaatccctgtcaagaagatatttttgctattttacaattctgatcacatttgttcctgtttttgatagcttgcgctgatggagtaatcagggtgttcaagctagatgatgcatcaagcaaaagcttcaagtatttcttcctatatataatctttcaatagacaatgttagccggtgggagtttactttgcaagcccattttcatgatctaactgttttttttgtttgctttctaaaattcagatttttaaggataaatcttcctgctggaggacatccaaccgccgtggcatttgctgacgatgcctcatctattgttgtggcttgtcatcatatgtctggttcatctttgtacatgtacggtgaagataagcaaaaggatcagcaagggaagcttcctcttcctagtatcaaatgggaccaccatcatattcatgagaagagatcagtgcttaccatctctggagctactgcaacttacggtactgctgatggaagtgttgtcattgcctcttgttctgaaggtatgtttttccatggctagtgtcactgtcatagcgatgttaaattggtttcagaatctctagtttaaaacttgtgtataaattgctaaagggtgatttcaatttgtgaatacccttatgttcaatataagttcttgtattgctgttcaaaatgtactgctctggtgaaatatcccttgttttttccttaaaccttgttattcgccagggactgatatcgtcctttggcatgggaaaactgggaggaatttgggacatgttgatacaaaccagttgaagaaccacatggcagctgtatcaccaaatggacgttttttggcagctgcagcatttactgcagatgtgaaagtaagtttttgtataaattcaaaccatcatgagtgtatgtgtgaccgtatctcatgtcttagcaagtgctttgtaggtgtgggaaattgtgtatcagaaagatggttctgtgaaagaggtttcaagagttatgcaacttaaaggccacaaggtattattccactacctatagcatgataatccatctccaacgatatagattttttctcactttttgtcttgtaatcgtttcatgtttaaaccaatgctatggtatccagagtgcagtgacttggttatgcttttctccaaactcagagcaaatcatcaccgcttcaaaagatggttcaataagagtctggaacatcaatggttagtagaattgtttttaaatgtctgcatcattctgattattgccaaatgcaaaacagatccctggtaacataaggggatctgttctggaatttataatagatggaatgattttgatttattaaacaaataacctgaaaggcattgtgttgtgtaatctggttgcagtccgttatcatcttgatgaggatccaaagactttgaaggtgttcccgattccactttgcgactcaggaggcaatccgttgcactatgatcgtctcagcttatgcccagagggaaagatattggcagcaagccatggttccacattgcagtggttatgtgctgaaactggaaatgtcttggacacagctgagaaagcccacgaaggtgatagatagctctcaacatttctctttgcaacctattcaaaaccttaacatatacctcaaaactattcaaacaagtgatagtaaatttaccacggttggttgtatgtgcaggggatatcacatgcatatcttgggcacccaaggctattacagttggtatgtgcctgtctgattctttcttgtatgtaaagttgtatgtgatctgaatctcatgtggtgttgttggttctcaggggaaagacatgccatggttttggggacatcaggcgatgacaagaaagtgaagctgtgggaagctccaaagtcgcaatctttgtaggctctcgcatacacgtagtcccttgatgacatgaggcgtatttaaacggtacaacttgcgaggaaaaaaactctaataggttttgtttcgagtcccaagttgggatcaaatgaagggtggtttaaagtccttcttgttaccaagtgtcttttaacttctgaagttttgaattttgctcataggactagtacaacactcacagtcttctatgttttccaaattaaggaaatttaaaaagcacacaacaacactaagaaatatgaatcgattaaaattattatacgcattttgttttctttgtatcagaaaaatgatagtctacatacatatggtaatttggtaaataatacaaaaagaatctacacaaccaagtgaaaaatcaaaaatgtgtctggtcgtggactccgatgggctttttgaggcaaattgaaaactgggccagaaatatgaaaggcccacgtaagtcccgaatataacctaaaaagcacactctctaataacagccagaattagggtttctctttgtcttcagcagtcagtgcgcatccgtaggagaaaagtgtgagaatctgccaccatgggtcgtatgcacagtcgagggtttgttcttcttcttcgtcttcttcgtattatagttacgtcaattgtgaaatctaacatatcgctatcatttatgtagaaagggtatttcagcctctgcgttgccttacaagagatcgtctccgagctggctcaagaccacctctcaggatgtaagttgatatcatctctacttttttgctctgctttgttgaatgaatcatgccttcacattattattattacatttgacaggttgatgaatcaatctgcaaatttgccaaaaagggattgaccccttcccagattggtgtgattctccgtgactctcacggtatccctcaggtcaagagtgttactggaagcaagatcttgaggatactcaaagctcatggtgtgttttcaatttcccaatctttcgttctgcatttgtcattttggcttatgatgttaatgtcatattcatacacttgcaaggccttgctcctgagatccctgaggatctgtaccatctaattaagaaggctgttgccatccgtaaacatctcgagaggaacaggaaggacaaggattccaagttcaggctcatcttggttgagagcaggattcaccgcctcgctcgctattacaagaagaccaagaagctccctcccgtctggaagtagtgagttaccttattcattgtctcttaatgacatgttgctttcaatatcagcagtcactcataagttgtttagtagaagttggtttggtctctgtataagtagtttagtcgaagttggtttggtctctgtataagtagttttgtttagaacggcttatgaactatcgtttacttggccacccttttgcatgaatgaacccacctgttctctatgactctatgaattgcactgacttacactcttatctgcagcgaatccactaccgcgagcacccttgtggcttaagctggagtctggaggaggattctactagtctgttgcttcccttttgttttgatgaattctcaactttagtcttaatgtgtcagcaggatttttgtgtttgcctctcttttttttccggaatcttatgctcccttgtttaagagaatcgtatgatcttgaatttactattgaatatgcttttgcatccttatactcttttccttaagataaccacatgatcatgaaatcactattggaaccatcatccccttttaagcattcgcatagcgttactatagtgtaatgaactgagagacaagagattaggaatgaactgagagacaagagattaggaatgaactgagagacaagagatttggaatgaactgagagacaagagtgacaaagaatgtaatcccgaaataatggttcttatggagtataaatggttttgagtaaaaacatatacggcaaagacagggtatgagccggccaaagaaccaacaaaaagagcaagtgttaaagagtgaaacaatcacaagaatctcagaatcaaaaaaaaaaagagaggctacaaactcattgcagatagtcaatcatcagcttgcagctttctttccgccattgtagtaacccaaataccatctcgcaaacttcttgagacccgtctgaagatcggtggtgggtttgtagccgagctctctctgcgcagaactgatattagcatgagtgaactgcacatccccgttcctcggcaacttcataatgttcctcttggccttgactttgagaagtctctcaagaatggtgacaagatcagtcactggaacgggcgaagtgttgccgagattgaaaacccgtaactgagccgcaccgcgcttcttaccaccactaccagtgctcttctcagccgtgtccaaagcccctaaacaccccttgacaatgtcatcaatgtaagtgaagtccctagccacggttccatggttgaccccctcaaagattgaaatggctttccctttgagaatgtctctggtgaagaagaaataggccatgtcaggccttccccaaggaccatagacggtgaaaaacctcaagccagtaagagagagtccatagatgtgattgtaagtgtgagcaatctcttcaccagccttcttagtagcagcatagagactagctggttggtcagttctgtctttctcggagaaggggaccttagtgttgagcccgtagacagagctagaggaagcccagacaatggcgggttggggattggcagatttgcaaacctcaaggagattgacgaagccagcgatgttactgtgaacataagagctaggattttccatggcgtacctgacaccagcttgagcagccaaatgcataacgtgggtaaagggaacaacttcaaagagcttcttcaagagagcagcgtcattgatgtctccttcaacaacaaacactccgcttctctccaaaagggcttgccttgctctcttgagcgatggatcgtagtaatcgttgaagttgtcaagccccagaacgccatctccgcggcgtttgagagcggcggagacatgggtaccgacgaaaccggcggctccggtgacgagaacagagaaaccgcggcgggtacggagacgggcggaggatctgacccgtttctcccaagcgggtccaccccaggagtaggtacgaagagaacggcgagaaggatcggcgggattggaggaaacgggagatcggtagaagaagatgaagatcaaaccaacgaagacgagagaccaaaaggcgagcttggcgacggaggattgccaccgcgtacggtggaagtagggcttgaacttgccaggcgtcgaaggaatatcatcaagatgcgacatttgcttcatatttacctcgacagagagaatcttcttcttcttcttctttgaggtttcttttttttcttggattggttttggttttggtttgtttggtgagagcgtttataggctctccgaataataagggaagatcatcaaattgaaaagatttttgtttctctatttttgggccttctttatttctttttctctcgaaaatgcacacacacagagaagaagaagatggtcaaagagcaagaagagattatgaggatttaagggatagtcaaagcttaattaatcactctagtctctatctcttacatttaattttctacagatttagtttcactcttgattaatttagttattataggtagattaactttacttttattattaatgaagctttcatcatccttatggatcttactttagggttcttatggcaacaaatgtactttcatcgaattatcattcaaatactgattcatcaaactcgatgcacttacttattacaaaattacgcacacaaatacatgtttaggtgctgcccaagatcgtcacgtgcaaactctaactagtaacatgtttagggattaattaaatcaaatttgcaacttaataccaaggcacatttatccatggggtacaaaaaagcaaagagtaatcttcaaggaataatataataacaacacgcatctactagaccgcatatataatagtaatatccatcaaagctctattttattcttcaaattcacttattgtaagataaaaacataacgatattgatttatagtgactagtgagtgagtccgggtaaatgtatgtggaaaggcacacttgaacaacgtagaaaatgtctttatgatgtgtaaaagagagcttagcttaacaaaagtctttagcggctgcaataaccgtatccacggtgagtccaaatttcctgtagagcacattggctggtgcacttgctccaaactgtctacaccgatggcttttcttttggagccaaccatcttctcccacccaaaggtcgaccctgcttcaatgctcagtcttgctgaaacctctcaaggtaacacactttctttgtattcttctctttgttcatcaaacagctcccaactcaccaatgacactactctcactgcttttctttcttctcttagcttctctccagcctttgcagctatctctagctccgaccctgtccccattaggattacgtctagttttgtcacctgtggagttgtctgagattacatatccccccttcaccactacctcgaccgaagttccaggtagatgaggcagcttttgtctggacaaagccaggatcgaaggcctctttctgttctctacagcaactttggaggcacgcgcagtcaaagatatcggaaggagacccatatcactatgggcccaaaagcccatattggaaatgtccgtttaatcacgagttatttgttagctttatatgacaccgttggaggaaaaaggaaatggaagtaaaaaatcacaagaacaatggtatttgtatggtttgagatttatctatatgtataaacttaagactggatatgcatgggttgcatgttttttatttacgtactatttaggaatattatgataaatgtagaggtttaatttcaaagatcattattataaacatcttttttttttttttttttgaatatcaggaggttctgggccgaagcccgtaattcctttaggcccgaaaccacatcatgtaatattagtttcgttccaagtgtcactcgaacttgcgatctctcagcttcgcctagggtctttttggatatgcttaattcaaaataactaccacatctcttgattgttcatcttcctttcaatttaacttggcgaaatatagtggacgtgtggtgtttgaaacggatacactcctcgattgaccttatcaagatggtaaccaaaatcacgatgatcacttctggccggcgttccattgagacagagagttatctcagtttgcttctttttaatttttagtttaattttctttctaaatttctctaaaatatgtttgtaataatcagaatgcttgtccgtcgaaatctcgacccttttcttcttaaatttttcattattctccaatatgggaaccctcttgaggatggtttcttctttggtggatgatttttaatgtaggtgcgtaataatggttgttttcttttttgctaatccatatataacctacactcatcagattcagataattgatacaaattatagtcaaattaaaaaagtatttgatatatattctccatatatatatatatatatcgaaaattaatttgcaggccaaagctttcatacagaatgatcaaaccctaattaacaatcaatatcttcttttttttgtttacaatcaatatcttctttttattcaccaattatttatgcatatgatatcaagataaagaaacttggtacacaattgtacatcatatatcttagaataataatattaaaacacccatacaatcttggatcgaatctttatgcatctatatataatatatcaacatgaaaaaggttgagaggatgacaccaaatgtctagctagcgagcttctgtgtagttcatcagggttgggagttgtggtaataacaaaggtaagaggggttagccataggagctccaatctgagagtgaggctgaagaatcctcacctgccgtttcaagaacttggtgtaacgtatggcttcgtcgagcatggaagctgtgtccatcttcgcaccaccaggcacgatcctcttgagaattcggatcttctcgctgatcctttcccgacgccgacgagcaaccaccgtctgaggatcgtcgcttatccttacgttacggcggttcggcttagggaccgtggcagggtcgatgtctacgggctgcatgacggcgatcatgtactgcatctccttcatcgcatccatgtcttcatcgtactcttcgtcttcgtccaagtgaattagggtttcgggaggtggatctaacatgagatggtgaggatcattgagaaaagctgcgtgttcttgtgtgagaagatcattagctttgttccaatccatgaggagatggtgaggctgaggctccatcatgcttcttttggggctgtggttggatctgcttttggacgagacacaagagtcgcacactcctttctttttatacataccattttccattttcatcttttcttatttctcaatatatatattctttttccagaaatatacacatatgtatttactgatatatatctttgactcgattaattaaccgaatgcttacatgcatgtctcttattatttacttcatatgcctcattttttttttataggatatatgtctcattttatgatatattttaccttttcctttctgtttcaattaattagatgttttgtaaatttatatgtaaattttaagtgtatttaatattttgtgattatttatattctttaatagtattgttttatgaatggttgcatggttttaaattaattgatatttggtagtgaaaaaaaactaacttcttaatatgtgcgttttaatcaaaaaaaaaaccttacaaaataaccattattttttatgactcaacttatttcctatgtaaaatgtccttgaatttaaaaaatggaacttttgaaaaggcttttgaacccaaccagaacattagtatttatataggttatgtatacaaaattttccaagattcaaacctgcttatatgttgtcgtgtcccgtcgtctgtatttttcgggactaaattataattttgcaaatagttaaatcttcaagtatttccagaagtatagttacccaagctaatatactgattccccaatatacatcaacattacagttcttatttatgtaaaaaattactaaatttaacccacattatacgatcaaagaaattgattagattcataatatcagattttttacacaaacattagtagaactaccaccagtattttttcattttttttatcaactagacatatattaaaagataactatatgattgactgtctaattgggaggagatgagtttacaaaagtaactttagaaaacaagaaaagagagaaacgacctaaacaatccgtcttaaaattccataaataaaaaacataagaaatcaagaaaaagaaaaataaagaagagaacattccaaactagtttagtaggttggagaaagctgaccaccaaaaaaaatttaatctgacaaaactatttttttgaatatatattagttattgtgaaaataaaaacgtgatgacatcatagtgacatgggcctgcatgaacaatttaatcagatatgtttttttttaccgcaatcagatatgttattacatacatatcaatattacttcattttatcttaaattatatagctcatgtttaattctggaattgttttcataactaaatttttttcgataaagttgtcattttaaaatatttcctagagttctaattaagtttagtgttgtgtgaatggaagaattcgacacataacttgccaaaaatccgtgcatgtgattaatttggcaaaggaaattaaagaaaatatcattagatcatgattaaagctaagttttgcagcaaaattatatatattgccgtttaaagactcaatatatttctacctttttcgctaacaaatttcatggactcatttgtgctagtttatataaaccttgttataaccatttaaattcgtatacgtacgtacggagcaatacaagaaacacatataaagcaaaatcctatagaccacaaaagatagaagaaatagtgtgtggtcaaaatcatggttactcaaaaagcaagatcaagaacaagggattaaatttctagggtttttcctaaggacgaagaaggagagagactttacgaaattagggcaaaaaaggagcgttgcactttggtttggatatcattgccataaggaagcataagtcgctcttgtaatagttactcaacacatgtctccatttttagtgctcattattttgacctaattttcttctctctctcctcttttgacaactcctatacaccaaaataggcaatttaacatcattgttcttctatttcttgtctttcttctaaaccccacggtttcttcgacattttcttacaagccctttcaacggccttgatttgatcttagctaggaaatatgagctggatacgataaatgacttcttcaacgttctctttatgatttttggtgtcaatttctagttcttaagttgttttatttgacgatttaacaggatctctcccccataactcattacacgaagtggggacggcttctttcgacattaaggtattgcccattgtttaaattctcaagtggataagtaaacttataatcaccactaattatatatataagtatattactaattaatcggtctaattaagataccgtctaaatgtcgttgtccacatgaaatttctatatgttgcgttcatttcatagatttaaaatcgacaaagctagaagataaattttcaaaatgagacctcacatcttcttttcacattgcctttaatgagttcaagacaaaataccccgtttcatgcattaatgttcatacttgttatattcatcaacaatataccagtactatgcaacatcaattaattataagcttcctactttcgtcctttttattagttaatacaacacttgcaattggagtaactcttacaacgagagaatgtataatcttataataaaaatttaatatgatgagatattttttttgcctacggtgatattaacataaggttttttcttttacaaaattagaatgttcagttcaaacaaaagaaaaggatggatatggacatatggtatttgcattattctagtagtcttcaaaagctttaagggtcaacaaccggatagtagatggatatgtatttgatacaaagaaataatatattactatgacgatttcccaaatcttctattttcaaaagaatgaggatgagacttttctttttggaaataacatatattccgttaataatatttaactttgctcactaattatcattttgttacttctaaagcaaaaatcttcggcgagaaaatcgaaacaaccaaacgatttggattccaaatttccaaacagaatcatgcgtgtatttttactcgctcgcaacgatttggattacacactttccaaaacgataattttttaattgaattaacccctaattaaaattaataaccaatcagattaagataccatttacaaccaaatcttctattttccaaaattttagtatgatttttttttggaaataaataaatattccctatcccattagtggccatcagttgtcattttttgtttctccaaaatcataatcttcggcgacaaacaatgattagatcttcatttttacgatcatgttagtgatttaatggacttgttagtgattttgtcttcattttatattatgttagtgatttttatcgacttgttagtgatattttttttccatttttacgtgcatgttagtactttttgaggggacgggtagaaatcactaacataaacgaaaaatgaaaaaaagtttactaacaagtcggttaaaatcactaacataaacgtaaaatacagacacaattactaataagtcgattaaaattactaactttaacgtaataatgaataaataactgttttttgtttcgatttttgtcatcagaaattatgattttctattcgatttttgtcgtcggagattatgattttgtagacgcaaaaatgaaaactgatatacactaagctactaacaagattataaaattgtttatataataatttccttaaaacaaatctaactcaaaataatgcatattataatttttaatagttatttaaagtatatatataactaaccggaaaaataaccgtatatagttttacggaaatttacgataaaagatacaaccgaagaaaatcaaccgccaatattaatgaaaagtcacgacaaaaagtaaccattaatattttaataaaaaattgtgctaaaaaatacaacggatagataacagtcaataagataacagaaaataacgataaaaagacactaacaaaaaaagtgtcaattaatattttaacgaaaagttgcgatgaaaagactcaacaaaaaaaataaccatcaatattataaccgaaagttgcaatgaagagacacaaccgaggaaaaataaccatcaatattataaccgaaagttgcaatgaagagacacaaccgaggaaaaataaccatcaatatttttacaaaaagttgtgataacaacacaaacaaaaaataaccgataatattaacgaaacattacgatgataaacacgaaaaaaaaaaaccccatcaatattttaatggaaatttgcgataaaaagataaaaaaaaacaaaaataatcgtcaatattataacgtaaagttgcaataaagagacaaccgaggaaagtaatcatcaatatttttatgaaatttgtgatcaaaagatactaacagaaaaaataaccatagatgttaacgaaaagttattatgaaaatagaaaaatgaaaagttacgataaaaaacactaacaaaaaataaccgtaaatgtttacagaaagttacgatgaaaagacatgaatgaaaaaaataaccgtcaatattttttacggaaaattgcgattaaatacacaacctttcagagtacaaaatgcatttattgagattgttatttattatattttttttgtaaactagcgagattgttattattagtcgaatcaatattgtaggaagaagacctaaagacaaattcggaggtcaattaataacgcgttaaagtatgtgaggcacgttcgagtggaatagcgcgttggacagcccaacatgaatgaatgatcgacttttattgaaaaagcaaaactagggcaagaaaacgaaacgtccacattagcctataaaatcactaaacctaagagcaaagcacattcacggcgactggaaagtagaaaaccttattgcttcccgcagatctctctctctctctctcgtaactgtttgttcgatggcactgaagaaggcggaagaagtgatcgagagccctcctacttcaagtgaagaagaggaatctggctcataatctgagtctgaaggcgaaactgaatcggagcccgagcccgagtccgagcctgctaagacgatcaagccgatgcctgtcgtgaccaaaccaattccagagacgtccgcgaatgtacctgagacttcaacggctaagcgtcctttgaaggaagctgctcctgaagctattaagaagcagaagacatcggaagttgagcatgtgaagaagccgacaactaatgatgaggttaagaagattgctggagaggatgctaagaagatgttgtttcagagattgttcagtgaggctgacgaaatcgctttgcttcaaggtttaatcgatttcacatctaccaaaggagatccttatgagatattgatgctttttgcatttatgtgaagaaactgatcgagttcgatgctaccaaaaaccaaattgttactaaacttcagaggttgaagaagaagtttaataacgctgtgaagaatgcgcgtaagaagggtcagacagaagatgaggtcgagtatgctaaagagagtgagaaaaaacgttttgacttgtccataatgatttgggggagcaacggtgttttggttgctggtaaatcatcaaagaagaaagttgcacccaaagagatgaaacctgaagaaacagacgcaaaggttgtgaacgaaggtctctccattggtagagagatggtgccgttcgggagttcttgtggtttggatgaatctaaattaactacgggttgggaaaatgttgaggatggagctgagaagagagaagtggaggaaaaatggaagaagtttaaggataagctgtttgagctactttacgagaggtctgtgcttatgaacaaaactgaagcgatgatgttcaaagctgaatcttgagcggtttgtctttttatttcttattatgcattttgagtctttttgttagcttgtggaactaaatccttatctaagtctttttcgtattttctttatgcccctatataatgttggatgtttggtttgggtataaaacccttttatttattattcttgttcggtttctatgatattagacagaagatggattagccctattagttcttcgacttgtcaatgtgtgttatcatatgcataccttgtgaagttcagctggtgttggactgcactgttaagaggcaaaattcataatcatatgtgttagcaatttacatatcgataagataccagaatggtacatgtcccgagacccgagttaatgttctgcttgatcgagtttctactgctctccatgtcgtggagacataacagcgttttgtcacattttttccacaacctgttacagtgttctgtgagctttgatctccagtcgaacatgaaaaaaacaacgtactaaatagttgaggcatgactgtattaaaaggtcatagttctccttatccaaatcttttgtttgtttcgattttctagccggacatttttgcttaggagtagcaaaatgataactaatgagcaaagttaaatatattactaaaggaatagaagatatttattacttacaaaaaaatctcatcctcattcttttgaaaatggaagatttgggaaatcgtcataggtttgggaaacactagacagagcgtacttcccgagaactctacgaagcttaaatcaagaaaattgggaaaatggtatagaaaatatatgatgtatttaacatgtctctatgtagaatatgaatctatgggagagagaatgaagttttcgaatgtcatgtgttgggttgtgatacacttgctcttttgcctactccccttgactatgagatggttcaggaacatgcttaaagggtagttttgtgcctctgccctctgtataatagagtcaagtcccctatgcaggctttcgtcggctgcaatcaacctattctagttctactttgtagtttagacatccaatttacagtttaaacattattaatgttcggcttctaagttctcacaagtagagagaaaacaagagtcatcattaaacaagtagtcacccaaaatcacagcctaacttatagattgccaatcaagaatctttcaacatgcgacatcgcgacactatcttcctgaactcatccaagcttatgtaacgcccgtgtcccgagttagggagtaagcaagatcttacacacgccgaattcgaggacgaattcagtttaaggggggtagacttgtaacgaccgcgtcctgcgttcataaagaggccaggttgttttaggagaaaactagaccatggtcaagaaacggactaaaatacttagtcagaagaacgagaaagttcaagctgaaccagctaggtgagctggacaagctaggatgaactagctagctaagttaggtgagctaaaccagctggaagactagctagctcagctaggtgagctgaccgacagctcgactgagctcggtgagctgatcgtgtactgacccagctgggtggtcattctaagtaagatcttgcttactccattcgttaaacgactcgtcatcggttgtgaattgatgaaccaatccctatcgttacttaaccatacaaccaaccaaccccactggtctaagtacaacgatagagattggggatcgtacgattcccttggttcacgatgaccgaatcaaactcttggcttattggtccatccgtcctctaaacgtactccccttcggttccatggtggacgattgagcccttggcttatcgaaccatccatgtttccgatccggtcatttactacgaccgcccacggtttactaaccgtttatccgtccggtctatggtggtcgataaagctttcggcttattgatccatccatacgatccgaactatatccttatcacacccaagggtccgtggattcatccactggatcatcttcggctagcccatgaaatccttcttccgtcggccttaggtttgctcgtgggtccaatatccgttttgtccatcggttctcaccgtggactttcccgttggttatccatcgagtcaccctttggtcttaccgatctttgatcggtttcaccatggctgaggagatagatacatgaaggcggccgcgatgttgatcctatatggtgaatcacgttccttacccattcttggtgctttctccctttaccggtaagattgcatccatgggcgacccttgggtgtgttcggatgcacttatccttgtgcttcctcgaacacttttctcgatccatcccatccgacgatcggtctgtccgacccgttccgtcagacgatcggcctgtcccatccgacccgtccgacgatcggtctgtccgatccgtctggccgatccgatctgtctgacgatcggtctggccgatccgatccaacgatcggtctaccagatccgattcgtctctaagacgaacggtctaccctctccatcctctacactccatcgaaccgttggaccgggaggtagttagcgcatcagttcggtcgagttatactcgccgagccgcaccccctttccgaccaacaactctaggatgtgttgggactcctttaagaatgttttatggtgtttggatgttgtgagatgatgagagattattgtgagattgtgagattattccaaatgccttgggcgtcctcccttatatagggggcgaatggatgcttcccgaagcatcacatccgttccttgcactcctccgaaaggtcacatccgttctttgcatcctttcgaaaggtcacatccgttctttgcatctattgggcgatgcaaccgttcgttggtacccactcgaccttacaccttttggtcgagacacctcttcacccgtgagctaccacagtcccccagctcgagtatcagctgaccggaccacccaactgggtcagtacacgatcagctcaccgagctcagtcgagctgtcggtcagctcacctagctgagctagctagtcttccagctggtttagctcacctagcttagctagctagttcatcttagcttgtccagcttacctatctggttcagcttgaacattctcgttcttctgactaagtattttagtccgtttcctgaccatggtctagttttctcctaaaacaacctggcctctttatgaacgtgggacgcggtcgttacagcttagctgcccaaaattaaagatgtttagcaataatgtttctctaataaacgtgaataccttcaacttagtacccacctttccgtccttgtccatgtcaaaggaacgaatcatgtcttgtaattcctcttctgtccatgtgaagtcatgcaccgttgccattttcgccacatctctccgagtaatgaacccttttccaccttctgacaaaaatcgcagagactcaatggagttaaaaaccattcaaacacaaaagatagaaattgcacaatcgatatattaccatcaaactgacagaagtacatgaccaattcatcttgtgtcatctgcatcttgctcatcaattcctacgaatgagacaagacaaatgcacatcaaggacatcctcctagactgttaagtaacagtaatacactaatacttgatgtaaaaaaaaaaccctgtcttttcttcttcatagttgcagcctctttatcgcttctcgtatttttcgtacgagagcctcctgcaacagagccctgtagagaaagcgctattgcctgcaagcactaaaaccagtaccttgttcatgtctatgtcaattctgaagctatcgaatttgcagcattacaatgtgaataccttgtctaagtcatcatcatcctcaccaaggaaaactgatgtattcaaaatcttcctagatgagactcttctcttggatgcagaggactggttcttaaatacaagtcacaagaaaccagagtaaagatcaaatggcacattaacattaaacacaattacaaattgccttcaagccagagagtaaccatcattcactgcttcattcatcggatacaagttgacacaagcaaaattgttacctttcttttacgagttgaattacacagaaactcctcgtcttcgtcctcatcaccatcaccatcggcgattacgggtgtataatcatcgtcttcttcaccggaattccgagtgcatccaatctcgctttgttctcagcgatccttgacaacctctgcttctcatattccgagattttcccctttatcggctccgattcgttgccggaactcgagctcgaactctctcgttcacttcctgagctctctccctccgattctcccctcgccattgttagctaattaggaatttgattctccagagtttgggatttgtttattttgccgcctccaacaatcgtttaagttgggtttaacttgggctcatattaagaccaattacttgggcccatattaagaccaattacttgggccctcattgaacacttctataatgagagaatttagaatacccaatagccgattgattatgttgggctttaccttgggcccatattgatattacagcccaaatacttggactctcattgaacactctgctgataaatcattgaaaacccaatagctcatgatgatcattatttttattttttttaatatttgaaagtttaagtcgagaggccctatatttcctagaattcacatcaaattaaatttatttccttaggagaaaaaatcccttacaacataactcgaactaaacacctctgcttgggagatttatcattaggctaacagtacgttggtattttatgatcataattgtgatgggtcaagttgtttttacatatcgagtgtggacatatttaattcaaaggattgaaaacacatccgaaaaaggattcgtatatgtgatattttccgtgtttaccgcattattttttttatagtttgctttgtttcttgtgggatatttcatgtattttgtttgaaacagattagttttgtccaaccatattgcgtatacgatccatacaaaataagaaagtttccacctttcgttctatatgatcatatgaaggaaggagagagcgcaatgcgaatggtgtgaaacgtgttattggtaagataatgcatggcctacacccactttctctttctttttttttcttaatttatttattttgtcgtcagtatagtttgatatgtatatatatataaaagtagccataagaagattttgtggggatggaaataccgcgttgttaataagctgacttgacttgtaaatagataaaggaagaaaaaaggccaaaagagaaaacacaaaagactaaagataagaacaaaagaaacatgtaactgattttcaaggacatgagtatggtctatgtatataaattcataaatatatagcgtaatatggaactagataataagagtagtgaagtgtatatgtacgtgtatacaacttaagcaatataaaggcatgcatagagatggaaataaacatgtgtagagtttgatgatctaacattaataaaggattccactgttacgaatcttgatgaacttgagtagagtttgtttattgaaataaatagactaactaagaaaataaatgaagtacttgtaaagtgagaggttgaggagcagatatggtgggcaagcttggcatctacaaaagttgagatggagattgaaagagagtaaaaattgtatcaaaagcttctctcattaaattatttatttaactaataaataaacacaagtaagaaaagaattttaaaattaaaaataatataaatacatttttaacttttgttatgcacacaaaaacacacccatcaatttcagatccctcgctctccaccttattatatatctttttagggggtcggaattatattacgtacaaccttttgttggtatactcctcttcttcttcttcttttgtgcaaccgtatactcattttctcaaattcaatgtttctaaattatatatattaaacacacatttggtagtagcaaacttgtcgctttggattttatcattttaattacagttcgtataaatatctgttgacccttattaatatgattgaacaaacaactaatttgactaaaatgcgtcatcatagcaaatgtatgttatgttgaaataatgatctcttacataccactttgaaaagggatcgaggatgcatgatgcgtgatgcgttccaccatccggtgcctttcgttgtatcacaatatatgaggttatgttagtgccatcgtttataaaccaattgttggaaatttggaattatatacatatacatttaacgcacaatatcaacattgcaatactcgtagtgattgagattttggacgtagaagtttttaacaactaataataaaatacttgaaaaacagtgggatgatggaagacagatgtgagttaaagtctgattataacaaaatcaaaatcttcctaactcctaggagagtcttctttgagacaaaagtacatatgcggtgtctaaaaggagtaaaagaaaaatgataactcaattagttgaaggacaaataacaccaaaagctgcgtattttatcatcattttactttttgtaagcaatgaatagaaaaaagcaatgaatagcctgttgttattcatttcttaatgacatgtcacacatacaatatagtgaaagatgaaacccagcaaacaaaaaaaaaaggaagagaaagtttgatagctttctaatatgtatttccctgtccatatattatcaagagtatgcttcgatgtgtgatcagtcccgtctaccccatggcaacataggcatttgctatgggttaaaagctattttcaaaaataaattgtgaagaaatactttacactcacgtatgtatattaaatgatggaatacgtgagtgtaaagtagagtagttctaatagtatttatcagtgattgattacatcaattttaattctaatagtatttgctagacctcgcctggaccggtcaatgtttctacttactgcgctcatcaaacggttaccatttgaatctagacatgtgatatatgatgagtgactacgtcggcgcgtcttagtggagccgagcctgcgtgacccaggccttgcttgttgcgtgactagcttatgttcacgtaggcatgttacaaatcaatacacacattagttgacaaaaactgaccgttgatttggttgatcatctctcacagggaaacgacacatgtgtttctgccgtacacgtgtagattgaccgatcacgaccggtcttctgcttgaggacacggcttatgatctgtcaaaactaaactattcacattcaatcaaatgtgtctgtatccaaccaacgtttattgcacaagagacaataacttgcggcatattgtcatttttcactcacaaattttagtcgtctttctccatttaatcaactcttgatatgtttctaaaacggaaatcttttgtaatgcttaattaggaccttagatgtttgaatatatattttaaataattatcctaaatgatgttttaatataaagagtaaaccaaaatatgttggtttgtattacttagattagcttgtaatctttttattgaaatgaaatcttcacattaaaaccccaaaaaaaacatgttgatgtattgtatacacttggtttgtttctgaaatatttctatagagaaatgcagttaatgcgtaaagcaaatgggcgcattatatatgtaatgcgtatggaccatttaaaggagaaaaagcaaacctttgtttcgtcggagaaaaaaaaaggttagaaacggcgcacacaaaaatgtattgtggtccaaataaataaaataatacaagacccatgtgacatcatggagacatatgtttataaattaaaaatagacccctcgcaaagacacaaaccacaacaaactctaaccattatataatcatataatcacaataatgagcagtagctttctgcctcgcatcaaaatcaacaccccattcatttttaattagaaaaatatagtattgagctaatccaagcattattctatcacgttatttagtcgatcaaaaataatccccacaattaatatatattgaatgtgttatacaataagtgtttgataatcagacaattaattaacttctcacaaaaatttatatatttgtgtgaaacttaaatttaaaaatccatcgcactgagcaaaataaaatcagaaactaaaaatttgtcatttaagataaattgaattaaggaaaatatttttttaataattgaaactccggtggaaatcaggaggagcgacatctccatgctgaaactccgacgagttctgtcctttgccaacataggagaagtgagttatgtttcttctcgacgtgaaagcctctcactggcgtccgttggactaaacactcggcttgagactccgtgaagttactgtgcgtcaccggtgagaaacccatctgtagaaacatcgcttgccacgtcatcatcggcctttctatcggacggctacgatccaacaccagcttctctatctccggctgtataagaaacctctcgatcttctgcattgcgtcgaggttggcgttgacggcgtcgagggattcgaagagagcggtgtgtgagtgcagcgagtgggcgagctgttgagagaagggcagatccgtcctctcgcatcctctgtcggagcagacgatgatcgtcggagatagatgcttcacgaaacggaggaccaaagggaggtgcgagaaggacgcggcggagatgttaacggcgacagcttctttctccgacgagttaggccacgagatggagccgaggaggtctaagctcaaaacttggatgtcaagggagatgttgatctcagaggcgaagtgcttgaggttgtcttgagtgaagccaagttcgagctggtcgtggttcgccggagaagcgaaaacggtgatcttgagggagagaggagcggcgttgtcgcggagaacaagctcttgcatgagggaagcccattggccaccgtagccgatatcgaagtcgatgatgtggagacggtggaagccatggaaggactctaagagggcttggttggaggtaaagttggcgaactgaagaacgggagagatctctgagaaggatttgtaagcagcgatcttgaagatgagggaataagggtttagggtttgggagacgttgtgaaggagattattgagagcttctttgaagtaaaaagctgctctttctaatggcttcccgacgggagaagagagctgttgattgagccgcgccaatatcccctgagctagacacgtgtcgctctctatgacctctgctgccttaaccagctgctctgttatccccacgggaccagggttgagccgctttgccggcggaggtgtatggtggtggtggccgtagaagatagccgcaggattctgtgtgtagtgggtttgactttggttgatcagaagaccggaaacatgtgacggcggaacagagtggtggtctaaaccgaagccggtgtcgacgactccgaaaccgggtgatgagtagtcagagtcgtggaaggtgggagatgtttggagaatgctgttgagttcaagagagggatctgtggaatctcccatgatgagtccgagaatgctctgttcgtggtcatgaggaacttgctcctcccaatcacccaacccaatggctccgcattgctcatcggtggtggcgtcgccgccgcctccgacggcgctgtttccgccgtgagaggaagacaccgtggaggaagaggttgggcttatgagggagtccagaacagaggtaggctccgccgcgggaacttcttcctcttcttcttcgccgcctcttgctttgcggtggctcaaaagcggagacgacggtggttgggggaaggaagacgagaaagaagagaaacaagaaatccccttcccttgaaactcttcaaagggtaagggcattgcagacgataaaaaatagtgtatttgtcttcttgaagctcttcttcttcttcttcttcttcgttgttgtgatgtggtgtggtgaggtatattggatgcgtgcaagatattaaagtggcaaagtgggcttcctcctttctttttctctcttatttccgtttcctatcattttgcctttgtcattaacttagctgattaaacaattcatcagcttctcttacacaacattttgttaatctttgctttctaatcttaactatgtcttctattacaaccccactcttacatcacgcgcgtggcttgcaaactcctttcagtgacatgaacatgatggtaaacaaaaatactaaatgttatgatatatttttaaatattgtatttgtcttcttgaattactagaaactattaaaaaaaaaaaacattttccccatatttttgatgttgtactgtatatttagatgtcataatacttgcccaaaaaaaaaaaaggatgtcataatatattgggaatgtttttgttttcttataatttattttcatgattaaaactttgtggcttgcaaactatatttgggatattgttttgttttgttttatctcaaaggtgctgtcgttatttccttttgtgtgatctttgtccccaatagtttgttttagggtttggacaagcttttggatcatctttatcaaattaaccactcaaatcacccaatccattgtacgagctaaaccacatattgcagtgcttatattaatttgtgtttcctttttttttttttttttgctacggacataatctaaatttataaatctaaacaaagtggaaacaaaaactatgtatatattggagttacatcaaaaatatctgttttgtttttcttgttttaacttaacgagatacgaatgatcgtcattatctgaaacattcatgtactacttataacaaagaaggagttatatatatatttacgtgtatataaaaacatactttctttggtacatcttttcgtttgaaggaaaaaagtgattgaagatctgtgaatgatgtttcttctgtgacaagttaaatgcacgagagattgagaaagaacgagtggtagtcctttattgagcagacaatggaagtcaccaatcaccatatatatacatatataaatatatctaccaatggaaaaccctataataaataaatgaataaagcaatcagaaaaaacaacaagaaagagaggtgggtaattgatgaagacaaattaaaatcggaccaattttgcaatgaatggcgacagtttcattatcatgtattcatgataatgaaaaagcatttacttttctatgcaaaccaattcattagtataaacaatatcaaagaaaaaaaaaaaagtataaacaatatcagattctgaatctatcttttatatgcgaattatgaccgcacaaaaaaacacagagttcagtttcttgtatagtaatttttagtcccatattataatacttgttaagtaccataaatatttgatgattattgatagttaacttactttatataacaacaaaaagttaaaatgttcatttttaagatttaattagtttatatgttcccatgtgatttgctaacaactacttctcacacttttctttcttatacaaaattattataaatcttgaaatgatcgcgaaactgtattaatattatttcttattgacatacataatacaccaacacattttcaagtttcatgatatattaatataatatttggtatattggaatactaaatatatgtgtgtgttaacttcgtgagggtgaagtaagttacgtggtgaaaacatgttcttttctctcgtctcaaggcacccttcatcacaagcaacacacccaaccccactcaatcggatagttcgtatgatgaacagaatcgtgctttgccataattagaggaagaaacaagtcagctaaatatattaatcttgtcaaacaataatttatattgaaggataacgtgttagagtttgtatgcatgtaaccatatataaatgattgcgtcgttcattttgtattagattttaggatgatgattagttagattagacaaaaattgatcaattattattaggagatcacatgggactgataaggataaagaaaaatagagaagatttcttcatctcattagagccaaagtaataataattatgattaaaaaaaaaaaaccaagatcggcgggaagtaattaacaattaccacaatataaagttggtaaaggaatttccttatttctttaatcatatacatttccttaaacataatctaactctcatttgatcattgacaacacattactatgattcgacaacaacaacaaaaaaaaaaaaaaaaattactatgatcgaatgacactccaaaatacagaagtctcttagagcatttctaacggagaaagtccctccatgggtgatgcaacgcatctttgctttgttcacgccttcgatgggcctcgtcgtgaccaaacctctttattgtttctcattcatgatttagtagtttatggattttattaaagagataggctttacctattgggcttttaacttcttttaagaattaaggttttgtttatgattcttaccttacgttgtagaatgaattagctattgattattgaataaagagttttaagagagctttgtataaagcctagagaggaggactctcaaccttaaaagcttgtgttcaaaccttgcaaggatgactttttaaacctcgtcgatatcgctaccgatctcgaccctatcctattgcctctttgtcaagttttgacgttctaaaaaagatccgttcgtgaatctgaattttcctgaaaatcttgcgtttttgtctgttatttagcttccgctttctatcagttggtatcagagccacgtcgttcctagtggtttgattcccttgcagcgatgtctgtgaaagacatgagatgagcgaccaattttaagtttgatattcccaagctccatggtggaatctctagtgattcgttactagattggcttgtgaagattgaagaaattttggagtttcaaaacgtttcggatgatctatttgtttcgcttgtgattaagaaattttgagggcaagccgcatcatggtggcaacaaaagcagaaaacacgcaagcgagctggcaagaatcctattaaatcatgggataaacttaaggagaagctatgcaaaacttttttacctcctcattacacgagttcggtgtctaatcgtttgaagaatgtgaaacaaagagccggatttggggatgatttcacgaggaattgtcacgttcatgtcaacaatttcgtggagaagcctacttatgatcgagattgttacgttcaagacaacgactttgtcgataaacctgtccatgttatctacgatgatgagaataatgatttgtctcctatatgcatatgattcttctttaattgtctgttattgttatactcttacttaaaccaagtgttttctctttgattcttcttggcaacattgtacttaaaattgttttctttaatccactgaaccatcaatagccaaaaaaaaaaaaaaaaaagtcaagaaagctgaaaagtacaatggttcattggagtaaagaaaagaatgagaaaataatttcataaagcagagaataaacttagcaaataataaacaagaccgacggattctctatgtttgtagaataatctataagacttactagtttctatggagattaattatatatcaccagtggatcctctgactcacgaccatagcaagtcttataaattcacagtgagtcttgtttacgtcggggttgtaaaaatgtttttccaaataacgatttacatcggttttggttatcggggatggttttacatgatattgaaaatttctctatattttatctatctctaatctctatgatgaattcatgaatggtgatacaatgagactaaatgagaatgaaaaagtttatagttgtatgtaaacactgatcatctttgtaatagggttatgcataatattgtgagtaaaaggcaacagagaatcttcaagtacatcgggaactaggtcgatcatcggattaggtcattcatcggattaggtcatttaggggtttacttcttagagatggttaacattttggtattaataagtaaaccgatcggattcggttcgaatttaaacaaaaccgagatattgaatgagaagccctagtcttatcacattcttctactcgttgaaatgcgaatagtcattagggattcagttttgttgaaatgcgattttagcactggaaaaacataagcctgaaggatttcaccgacaatggaacaagggtaagtttctttgtttcgtttgtgtttttttgtctccgtttaatgggtctggactccggcgcattctctgtttcgtttgtgtttgtgtttctttgtctccttttcaagtctcttgatagacagatccgtgattccattcttgcaaagaggaaacgaaaggttttcaattccctcatgcgattatggctgaagtatgactagacaacttttctactcatatatttcttctcgtagattcttagcttccttgtttttatcttttttgccaaggatgaatctgttgtattacaaactttgtagcttctttctacaagcaaaacaaaaaaaaactcgaaaccctaattttaactcttgtcttcttttggttttgctagtgaaagtttgcgaattagagttgttatgggtaaagacaggatcagtgagttgcctgatgctttgcttataaagatactgtcttttcttccaacaaagattgtcgtagccacgagtgttttttctaaacaatggaggcctctttggaagttggtgccaaatctcgagttcgattctgaggattacgacgacaaagaacagtatacattttcagagatagtttgcaaatctttcctttcacataaagccccggttctagagagctttcgtcttgagtttgaatcagaaaaagttgatcctgtagatattggactttgggttggaattgcgttttctagacatctgcgtgaattggtgctcgttgctgctgataccgggacggggacggctttcaaatttccgagtagcttgtgtacttgcaacacacttgagactttgagactcgtacttttgattcttgttgatatctcttctccggtagtaatgaagtctcttaggactctccatcttgagcttgtgagctacaaagacgaatcatctatccgtaaccttttatcaggctgccctattcttgaagaattgcttgtgattcgaggtgaagattctgatattgaggttttcactattgatgaggtcccttctttgaagagattaacgattaatgacgaccatgatggacaagagttttggggatatgtgataaatgctccttctttgaaatacttactgattgaagacttaagatgtcccgggttttgtctgaatgcgccggagctaatggaggcaaatatttttgatggtacatctataaccaatgacaactttcttggatatctcacttcagtcaaacggttgttgttgaatttatcaccttggaaggtaatttttcaatcgtcaattgacttctttgttcgttgtctttatacgctaataatatttggtctcatgaatagattacatatcctactggaagtatcttctatcagctggtatctctagagatgtatacacgtgaaatagattggtgggatctacttacgctcatgctcgaacattctcctaaactacaagttctcaagctcactgatgtaagacattttattattagtcagctatgtatttttgtatgatctctcgtttatgatatacattgaatggttattgtctctttgatctcagaattgtgtgaaatttcataaaaatggtttgccgggcggcaaatggaatgagccaaagtatgtccctgaatgtttgttgtcgcatttagagacatttgtgtggagaagattcgattggggaagagaagaagagaaagaaatagctacatacattctaaagaacgcaagacgattgaacaaggcaactttctcgacaaatcctgttaactcggaagagctcgacaagttgaaagagagacgtaaggtgcacaacgaattagatggtgtggtcagggcttcaaattcatgccagtttgtattcaaattcgatacatcttatcatgtatcagactcttcttagggtcttgggtagtggtgctagtcgttgggagttgaaaacttgaaagtttaaagtattagaccatctccaatggtgagaaccacatgagaggctctcaccatttttaagttttaatgttgcttttatcaaacttaagaacttgaattaagttttgtctcctccaatggtgggattctcttgagaaaaaaataaattttgtaaaacaatacatatatggttttgtttacaatacatgtttgcttttacttggtacaaaacattgaaaatgtacaatcaatcaagagaggactagagacattgaaaacgtacaatcaatttgttaatattaaacaaacaaaatggggaagttttcagggaaaagtttctcacttgagctatgtactcagcaagaccatgagtctgcaacaacaaaacagatcacaattattctcctgagagtatgttaatccgaccacaagaaaagtcatgaagcaaaatctttacttaccaaaacacatagaagcctaatatagatagatatcatatcactcaccctaacataaagaaaacatataaaacttgtctatttagctgattaaacaatcaatcggcttctcttacacaacatgttgttaatctttgctttaaacttaactatgtcttctattctaaccccactcttacatcttttctaatgatcgtcattagcccgaagatttatgaaacattcatatactacttataacaaaggaggagttatatatctacgtgtctataaaaacatactttctttggtacatcttttctttttaagaaaaaagttattgaagatctgtgaatgatgtttcttctatgacaagttaaatgcacgagagattgagaaagaacaagtggtagtactttattgagcagacaatggaagtcaccaatcatcatatatatgtgaatatatctaccaatggaaaaccctatcatatttaaatgaataaagaaatcagaaaaaaacaacaagaaagagaggtgggtaattgatgaagacaaattaaaatcggaccaattttgcaatgaatggcgactgtttcgttatcatgtaaatgaaatttacatttctatgcaaaccatttcatttgtattagaaatatcagattctaaatttatcttttatatgcgaattatgaccataaaaaaacacagagttcagtttattgtatagtaattttagtcccatattgttatacttgttatttaaatactataagatttgatgataaattgatagtcaacttactttatataacaacaaaaagttaaaatgttcatttttaagatttaattagttttatatattcccatatgatttgctaacaactacttctcacattttctttcttatataaaattattataaatctagaaatgatcgagagaatgtattaatatatatttttattgactttttaattacaatttattatatataaatgagaaagagaaaaaaaaactgaaccttagggcatctccagtggttagcttcaaatttttcttcaaaattagcgtttcttcaaatttgaagacaaaaatgaagcaagactttcaaatcgtttccttcattttctacttcaaaagaaatattcttaaatatattctatctctattttattattaattatgaataataccctttactttgtaaccttatgaattttaaccaatttcttttataataataagcaaatacaattatacattaattaatccatttcttttataactttaacccacttcttttacaattgtatcataaatatatctttttaattaatgttatgtaaagtacattattataaagaaaatcacattacataacattaattaaaaagatatatttatgatacaattgtagacatataattctcccacaaatgatataaagaaaaggaagataaaaataaataatttgtttttgcattttagtttgattggattaaaataaaaataaataatttgtttggtgcaaaataaaattttgttagaattttaaggatcattttataaatagaaaagttcatcttcaaattttgaagatgtaaatagtataccttcaaatatgaagatacattattcaaatcttcattttgaagataaaaatgaagcactattggagaagatttattcatttttcacttcaaaatgaaggaaaaagtgaaaaatgaagtaccattggagatggtcttaggcagaccggttataaagatgtgcaattggagcattagaacatgattcattttaaatttggcatttttttagtatttaaggcctaattttttataaaaaacttcttagaaaatgtccaaattttgtgaatgatattatatacaccattttttgtttttaaaattgttgaacaccggaccaatattttattgagccggacctaaccttaggtttatcgataaaccagcaatcctgtaaaatgatcacgtacaagcttggtttgcacgatcaaaagtggaggagcattgaagtatgcgagtggcatccaagctaggtttgcaagccaatagagaagataatatttctttttcgactgttttaaaatgtttgtactgatttgtaaatacgtttttttaataaattttaacattaaattagaaaaaaaaaaaatggatgacatacaaatacaccaacacattttcaagtttcatgatatattaatataatattaggtatgttggaataatatatatgtgtgtgttaacttcgtgagggtgaagtaagtaaagtggtgaaaacatgttcttttctctcgtctcaaggcacccttcatcacaagcaacacacccaaccctactcaatcggatagttaggagaaaatttacattattatacaacctttataaaatgaagaagatttcagctaatttgttctcctaaatcggggtttgtatgatgaacagaatcgtgctttgccataattagaggaagaaacaaaaaagtcagctaaatatattaatcttgtcaaacaataatttatattgaaggatgacgtgttagagtttgtatgcatgtaaccatatataaatgattgcgtcgttcattttgtattagattttaggataatgattagttagattagacaaaaattgatcaattattattaggagatcacatgggactgataaggataaagaaaaacagagaagatttcttcatctcattagagccaaagtaataataattatgattaaaaaaaccaaccaagatcggcgggaagtaattaacaattaccacaatataaagttggtaaaggaattttcttatttcttaaatcatatacatttctttaaacataatctaactctcatttgatcattgacaacacattattatgatagttttgctcgtggcaactaggatgagaattccagttcttcggttatgtggcaatcacgcaaatttccgagtttcacgagtttggaatcggtgtttctcctcgcaacttggctttgaccacttagtagtaatcctttgcatcttgagttgtaatgttgtttttatatttctgtagattgttttaatctgtttctagttttttcggtagttctgtcacaaatcaaaaatgatatataattttactttttaccaaaaggtaaaaaaaaaaaacacattatgatgatcgaatgacactctaaaatacagaagtctcttagtgattataactcggcccaaacaatgcactgtgcatcgtgcagttcaataaccacattttcagtcaaagaaaacccaataaaatcaattagatggaaatagcaggggctcattgggagaatttagctcatttcctaagttcttcttcacttgttacaagttctctgaatcatggattcgatagatctggttatcattcatcaattatttggttacgtgattttaagacaaagatttaggactgtattattcaaatgaaccaaaacataactcttttttctgaaaatattgcataaacgaatacaataatacaaggcactatctctgagtctcggaacgttctttctttgattaagggagacagagcacacataataatatcagcagacgaatccctgaggaacatttttgccgcaagagttgagaagcagagtgagagcaacgggaattttgacaggagcaactccgagaatgctggttttaagtgcagtgcacagacaaacggcagcttcaaagtcagccaaacctttgatgagcgagcaacactcctggctcggtggtgtaccgatgacctcactaaccagacctaaccagctcccacacactccaaatttgagtgtgtctcttggacatttcgtggtggcttgttttgcgggagggggagggcatggcttgacggtggctcctggtgtaacatggccgaagaagaatgttatgttaaggagcagcaagatgagaagagatcgcaaagctttcgagatacccattaggtttatcttgaaactagtgctatgtgatacctatgaggaagaagagaggccttaacaatttgcgttctttctttgttggtgcctttatcattggggctttgtggacataattgtttgtgttatccctagttctgtaaaacgtatttgtcttcttctatactttggaaaatcttttccgatcactcaaaaatacagttgttgctgttcgaaaacgacacattcatataatatctgatagacttttatagatggcgagatttaaggagttgacccttggagaaaaagtttaacttttcccttgaggaaataaatgaacttgtaaacaaaccccttggagaagaagtaaaagataaacatagacgtggctctatatattagagaaacccacccagtggcttaggctaatctaatctggtgttgaaaatggggtttataagaagctacttctcattcgtctgcggaaccatctgggggatatatatagcgcagagctacaacgttccaaacatagaaaaggtggctcaagcagcttattccatgggcatgcagatggaagaaagatatcgaaagacaaagaccaagcccaaagaagacttccaagactaaaacatgtaactgttttctttctactttgtatgatgcgtttgttttcttaatcaatctgatttaattccaatcataagaacgactcttgagatcttactacagactcgaaagtgtgtttaaatcaataacaagaaacctgccacaaaatcacacctgttcctgtgctacagctactgattttacagcttaaatatgaaacttttaaaaaaaaaccacctccattttacgaaaatctggtcaaaaatcttaagaactttgcaagatttgatgattaaaaggatgatgaagctaaccccatggcgtttatatccggttcaataagtagccaatcacgcaaccgagcagacccaccagcagcatcaagagcaaggaatgaccacccgactgcttcttgcttgtttctttcctcagcatttcctgaatacacaatatatacatgtattcgtttatgaagattacacaaataacaagtagatcacttagtgcactggggtcaacgcgtaccagttcgagacggagcttctgactttgttgagtagcagaagtcttctcctccgtcaatttggaaatcatagaccatgcctgagcgaatgagagaggatgttggtggtgaaacttaactatcaagatgtcgagaatggtaaaagacaaagatttgtgatgttgttacctctgaagatttctcacttgtttcttcaaacgttcttgacacctgaaataagaagatgcatattacactcggtttcttaacattggataacaaaatgaatcatcatctcacgtcatcaaagagtgaggcagattgagaggcaatatcgttgagggaagccataggagagttgccttcttcagaaccttcagggacaggtgaaggaggattagcaggaatgtaaacaactcgcagtttgaaatcctcaatcactctaccagcctccttgttgaactgcaacaaagaaaccaattcataataagaagaagaagaagctaaagcaagagagttcctttaaaaaagcatatagtgtgcaaaccatttcagcgaggacttctttggaagtagtaccatcagagacaacaacagtctgaacaaggaacttgtctttgcattgcatatcaagtggtgcctctttctgggcttgcatcgtcactgaaacaaaacaacaatcatcttttgtgttgttgactaaaaaaaaccaaagcttttgaatgaaagaagaaatggttttaagaacctgtaacattgcaggaatcaccgggcaagacaacaccagtgttaggacgaacacagtatttgcgaggattggttgttttaacctgtgtgtctctcaattaacatcaacactctctcaatgtgtactaataagacagaattgtaagaagagaatgtaaaagaccttaaaagcgacacattgagtagttgtcttgttggtcaattgcatcgaacacgaactttgtttcttcaactcaacttctcaccaccaacaacaacacaaattataacagaggttacccaaacaaacaacgacggttcaattcggagaatcgaaaacgtaaaaaaggtgaaatgaatccgagagggatcaaatcaatcggaaaaaaaaaacttacaggggaatttaagctcagtaggatggatattaacgagatctccggtcgtcatgcttctttgtagatccttcgagattgaaatttgatttctctgttttttttttagggtttacgactgtgagaagaagaatgagaatcgaacaaattttgattttggtcagagaagaagaaaagtgaataaatatttttttgagccaagactggtaaattttgtagttttaaatattaaatgccacgtaactagatttgacgatcaccgattgaccgtgatttttttaatgcgttagcggttagcccaacaaaatcaaggctattgttccctgactgaaataagcccaacaaaaaggatccattatactattgtgggccttctaaagcccagtgaatttttattgataataggcatttttttttgttgaattcttttgagctgaatacatattgatgattcttcccaatatgttatatacaaatcaaattcgaatatggaattgtaaagagaaaaagacagtatcattaacgtatggtaaagcctagctagcttagctactgcatgcttttgatattaaatatataacacggcaactgagaaaacaatatattttcaattccaagagaaaattctagtagttccgaaaatttctttaagaaaaaaaaaaaaggtctcctgatcgattatcaaatatcataaaatagtaataagaaagttaagtttgagctgaaagtaaccacattttgaagattacaaaagattgggaaagtcttcgtagctagttatgggccaccccaacgttggcagctgaaccgtaaaacccttctcttcccatcatcccatcctctccttccttcattacaccaaaataaaatatctcgattatgttttgatgatcaatgcatgcatgctcctgattatatacatttgaataaataaatatagtgtagtagtagtaagtaacctgttggcgcacgttagccttcttcgtgggaggatggtcagccatgagtccaaagtgtatgtgagggaaatgagcccactgtttcatacatattacatcatatacttagctcttttaacattaatgtgtatttatcttatacataacataaaaacttggtcaaaaatatacgaatacaaagccagactaaaatatctgctagggaactttactgaaaccctagatcgtagatcctaaggctagtcctagctaatgtatgctggataaagcttatgaattatggattattacggtaactattttgttttatgtttttaatttaaagcaatgtgagtatcaatgtagctccacaataatctagctaggttcaattcataaagactaaaatgagattgtatgattatggatataatgcaatatagaaaattagttttatatattaaaaaaagaaatggtacgtttttggcagcagcactgaaggcttctctgtggctgatatcagggttgcctgcctttatacgttggatctcctctctgtcaacatttttatttttatatcatataatgaaatcaaatctgtcacatctatcgacccttaattatatgagtaaaatggttaattagggaaatttaattatgccattttaagcaaaggaataaacttattacttgatgaatcggttgtatgcagatggtactctttgtcgcttctctggggctgcttttccacaaacaaacaaacagaacatattcaattttaattccaaatcaaacccttttgttaaaaaaaacattattggtttttattgtgcctccccaaaaaatctaaaaattcaccaaaaaaaaacaattaaaaaaaaaaaaacaatcactcttcgactcttcctcctttctctctctccctctccctctcactttgctcgttatcatcatcacttcatcattatctttcttacgatctacccccaaaactatatcagttggcatctataggtttagctagatttccgggggataaacacatcacttattaattttccttttgttgtcgaaattgttttctgaccaaaaaaaaagtgcatgcgagaagtcacataccgagggaacaaaaatgaaatcaaaacttataaattcattataaacaaacgagattctttggagtgtatatataaaaggttgaagaaatgaatggataaggttttgtgaattagggtttttgttttcttatatatatatatatgaagatgttgaaataaagagtagaagatggaaggttacgtctattggctggtggtggccgaggcatctcttgtagatgatccactgatcttccgttgcgagtcgccataaccaaatgctcgttcgggtggtgagctgaagcgtgatggctcatcatcatgttcatgtttatattctgccctccgcttcgcatttcctcctaataaatgaaatcagcaaactaattggcaaaaaaaacttaaaacactaatcaaaccaaactactttgatatgatgttttcgaaagaaaccctagttaactagccattgccaaactacttagatctatcccgggatgctaacaaaattaaacatttttggattgagtttcacaattttgcgtttctcgagaagaaaagccctaattattactctctgttttttttatgaaagaaccctaatttgtttcgatgaatgaaaccgatgtaccaaaagatttggaggaggaggaggaggagggggaggtaaaaaggaatggccaaggttggaaacggatggaagaagaagagctctcatgctcacggtcaccgacaaaaggttcgaacagtggccgcatctgaccgtcaccgtcttgaacaaactactcggaggaacactcacctgccaattaatatcacacattaattaactagtaattcatgtgaaaccctagctagagttataaatttgaaatattgagatgagatataagaataatccaaaatttacagcaaggacagtgtcgcagaagctgcaatggacgtaacagagctggtccgtagatgagaagtggtccggtggaaaagctggagctgaggaggacgacatggacatgctcgacatggagtctttttcttgatttaaaacaaaaaaggagtaagagagagaggagggctttgatttgattgaaaagatatgactgatcgatgttcagatagaagtagattctccttccaccacacccttttgacaattgtgtttagtgttgggtgatgagcagtactttataaatgtcttgtacttctccagaagttgaagtccagagagagaaggaagagaaagaacggtggagaggaagatgtggtttagagagagagagagagagagatatctatttatgtaaatatgaagagacactgtacctaaacaaattggcgacatgtgatgaagaggccattgtagagataagctgcatacctgcattctcatttactaccttttgaaccggtttatcttctttattattcctatccatcctttttctttcttctatatatcaaaccggaactagtctttgtttctatataatcagataaaaactctactttgggactaattatcattatcaagtaccattgaattagtagccgatcggtgaggaataatagatataaagatttcaaagttttataacgacaagatttgtgcagcatcaaacatgtacatacgacaaacatgctaacttttttttttttttaccaactatttaaaccgcttatatatttgcggaaaaaacaaaacttcaatttggctaataagtgtcgtacgtgacacatgtatagaagattaaccatatctatagggtttaattaggagtttatttgaatgtcgaacatccaaaaattaagataatattaattcacatgttaaagttggaattgttaaggttttctattttggttatgcattttgttacatggtttgtgaccttgtgtcgtcgcaatgatgataatgcaacagtggaaaaaaatttgatgataattgataatgcaataacagaaaatatattggaattgttaaggttttctattttggttaagcattttgttacatggtttgtgactttgtgtcgtcgcactaatgataatacaataacaaaaaaaatatcaactaaaagcatgaaaataaagagggaacaatatgaaaatatacttatgcatgagataaagagagaacaatatgaaaataaggttggtgttgttttcatagacctaaaagcagcagaacttgaacttgaatgtgtgttgtggtggatctccagaaagtccttggcatattacacccatatttagagttaaaagtggtcatatagctagatattttgtttctatatgcacatatacactcgcagtgaatccaactcttcagcgtattgaggtcattgtacaagtcttctccgcaaaataagaagaagaagataatgtaaaataaacgaagttaaatctaatctggttacggtttgaattcaattggatgaaaaatgttttgttttttcttttctttaaaggacgcaaagttcgatgaagtgggagagagaggaagaggaaagggacttgtgcatggaagtgattaagcaaaggctcattcatcagttgttttcacacttaataacatttctgccacaccacactttccctcgatcctcgtcaattccatgcccttttctatttattagtatttgtatatactttctctacattccaatgtatatcattttgtcatcattatttttacccgcaagtgtgtggtttcgctaaattccataatacaggaccaccattttgtggtaacttcccaattgttcgtgataattactaggtcatagtgaaatttaaatttatttatatctgaaattagtttaagtttttgtaaatattatggctatccggtttcacaatatatagtgtagacatagaatatgatttttgtaagtcaaaatcctatcacaatagaacttcaagcaaatatagtatagttgtttgcaactttagtatttgtattgagtttattagagtgtgggcttccaacataaaaccaattggcaatagatggaaaggctcatatcttatatatatcacttaagatcctactcaactttcgatgtgggacattgtccctaatacgccccctcgagatgatggttcttctagccattgatctcgatatgtttgggcatggatcggcgggccaagtattgggccggaccgatgtggatcgggttgagtatgtgcggatcaggctctgataccatattagagtgtgggtttccaacctaaaaccaattggcaataggtgaagaggcccatatcttatatataccacttaagatcttattcaacttccgatgtgggatattatccctaatacgccccctcgagatgatggttcttctagccattgatctcgatatgtttgggcatggatcggcgggccaagtattgggccggaccgatgtggatcgggttgagtatgtgcggatcggggtctgataccatatcagactgtgggcttccaacgtaaaactaattggcaataggtggagaggctcatatcttatatataccacttaagatcctactcaacttccgatgtgggacattgtccctaatagagttttcaaaaatttaacttcattaagtaatcaattcatatgatgttctataggatgaaatattcatcgtagggactaatggaaaaaagttcaaattcttttcgttacaatttaagtcgtcctttgccactaaaaatatcctatatatactcataaagttttggaaatttgtttcaattcgtctagaaattattgtttgtagaaaaaagaagtaaggatatgaaatgaaataagataaactatgaatgcagagaaagacagaacattaaaatcgaggacgacacaaggcgtcgaagttgactaattataaaaagtaattaatcgcgaaatcatgtaacggaaatgaaagcaaaaaagttgaacaaaggagaagcttatttaagaacatatactgttttatttccgatttgaccattcatatatctcaatctaccttacacacaaacattatatataaatgtaccgagctagctaggcatgtatagtatgtcagcgacatgatctctctctttttttttttctttttttacttttacggcactttccctcttgtgttattttttgttctaagtattttcaggtcaaaacctattgaacaaaaatcttttttaaaagtgttattgaatttttccaccgcctgaatgggtgagagagagagatgtcatttctcacacaaacaccttggaaaacaatcaacatctgagtgtatatatgcacgtgtatatgtctctctttagtttcattaacattcccgtttctagccacttatcttcgccatgccaccgttttgcatttcacttgacatcacatcttttcaagacctctaacaaaccagaactactttacatagtggatggaataacatatttctaacttgttcattttattcaatatatattaattgctaattagtttcttttcccgacaaaacaataatctattacactaaactgaagaaaaaaacatagtcaccaccatacatatattgagcacaccacgaaggtgaatatcttattaggtttactatatatacatcttgctaacaggtggggcagcttcagtcgtctaattccttgtgacatggagaaaagttgattcttgaaacttcaatatcttggatattttctagttacatattcaagatcaattgatggatgttctaactaagcactttcacgagtcaagtttcacgataccaagtcttctctaatcttccatctaaaaggagagttagtatctttataatatatcttagatattattgggaaaatagacactttttcaaaaataatttgtaaagtagataaattttttagaaattagagatatagacactttttttgctttttgtgagatagagtatatgtctaatagactaaaaaacaaaatacatatcaaatactataataccctttatcttgagagagaataaaaataatattagagaccagttttactttattttatttgtctttatctttttaatttttattttagttttcttaaataatttacttaaaaaattacattgacttttagagtatttatatgtcatcaatttaatacacaaacatttcaaagatcgttttgtacactaaccattattcattggtgtacaaatgtgtataccgatattcataaatagaagtaatattgtttttaatattttacaaacataatgattgtataaaccaaatattattacttaatataatggtgtacatgatggtgtacataattaagttaatcttgatggtgtacaaaatgattaaaacattatgacgattagatagaatggtgtatacaacttttaaatgatagcatacaagattggtaaacaaagtgtacaaaacttggtgtacacttacaaggaatgtataaatcactatttcagttagtggtgtacgtcatctcgtacaccaattttagtacactgtctcatagatctttaaaggtgtacgatcatgtacaccatattttcaatcatctatgtacatcattttgtatactattatactcactctatcacttcttacaataatattatatattaatttttacattattgtcgtacactaatatttgtacaccagttttaataatatcacgtacgctgtcggctgggattaaataaaaaaatgcaacatatttttgaaatatagcaaaattagtttttttagattcacctaaaaaatttaaaagtcaatatgattatatggtaatttttaatgaataattattatcaaataaagtaaaaatatttaagtaaaaagaaaaagtaaaatttgacttgaattttgtctttatcttactacataacaaataacaaaaggttatataagtcatttactaaaatctctattagacaaaaagttgtattagagaggaaagagaatagtgtctatttctcctattttaaaaaaaactatctactttgcaaattatttgtagaaaaagtatctactttccaacttattattttgcatacctcttgtgtacattcttataggattttctttttgtatctcgaccctttttgactgtttttgtattctttaataaaaaagatcaattcaattcagaaatcatataatatgttgataagaagacaaaaaccaaaacgaatattataagttttattgaaatttgtaggggaaacaaaaacagaagacgaaacagtacatgctattgtgtaaaatgccaacatgtcacatgtgggctctaataggaaaataaaactaaaaatcgaacgggccttttagatgaacgttacaaaaatgtgttctaatatattattagagattgatggtgaaaggcactttggtaggcggtaaccatgaagcagagtcgatgaatttgggtaacgtaaactctcgagcttcttggatatcagatatcacgtgaaacccggcccaatcaacccggttctctgtccccgaacccggtcccgagttttgatactccccataatacaacgtgcttagagccgttacattatcccaatcaatccatccgttgggttcgatcaacgtatcaagatacgtcccgatcaccacggtccgtgcgtacgacctccacggacggcccaaatacgttttcacgcctcctaactgtacccccggagctcctttcaccacggagttatggattacgattcctgttgtctgattcgggttgaaccggctctgtgccgttatggtgttgactccattcggtgggttacgtgcaaatatccgacagttttgtaaaacagctgcggcgtttccgaaaatgaagtcaacggttccgtatatgtcgcactccctgaaaaactgacgaccagagtgcacgtagagtgtgtcttgatagccttcaatgctacatctgtaaaacactgacatgtctgaattcgatctgagagccaccgcctgatggttttccggtcctgccgtgttcctgattgttatgtctcgtcccacgaaaccgtccccctcagccactgtcatgcaatatgttacgtggcaataaaacgaatatatatagtgtaagttgttaaggagaaatgtctaaccaaaagtggcagatttgtaagtggaaaatcctcggcccttgcttttgtcaccggtgattatggttttgccgataccatcgccagtgatcatgatgttattagacttgattcctacattgacatattcctcgtaaacgccttgcttgacatgtatgacataccttgggcttcctttgagcctctctccagcaccattcacggcctcttggatagttttgtagtccccggaaccatcttgagccaccactacatccactttttcacctatagatagtgttttcattgttattttcgatatcccaaactccttaccgttttgttccatcctctaaaaaatacaaaaaaaaatcaagtaacaacgagtgaattattcaaaacatgcttgatatttaagatggttttgagaattttgattggttagtaataatgttagagctaccttgttgatggccaaggtgttaatgacatcaatggtaatgctctccaaggaatgagacgagacaccgagttctgacatctcttcctgacatgtgtctaggttggtgagtgcggtgctgagccatgcttgcacgtctgacctagagcaaacgttcttgggacacaacacgctctcgttgagcctgtgaatagtctgctcgtacagatccatacattcctcccaagcttgctttgaaccaaattgtggctcaagaaaatacgtgtcactcttggctttgacagccccatctagtgttcgttccacggacacttggaggaactgtgtagtgcttcttatgggtttgtgtttaatcagtagagtcttgcattcacccggatgcggcgtttcatcgcacatttcatttccgaaaaccattgaggaaacatcagttatcagaaataacatgaaacattttacaattactccacgtttcatcgtttgatgtttcactaaggtaacatataatatgaatcatggtttttatagacattttcccataatatataagttacaaattggattggttttaacttttaaatgtgaactaacgcatgttgcagtttttttttttgctaagacatgttgcagttctaacttctaacctcatggaatcttgacctcctactaattaaattgtctttgtaggttttgttccatcaaagatctttaaagtcccatactattatatagagtacattcataacttatgtatactaaatagtgtaaaatatcaataaagaaaacaactaaaagggaacaacacagattaatccgccattaaaaggattaaacctcagtactagcaatatagtaagtaacaagaggcaagtcatcagagaaagttaccctaaaagtagaagaagctcaagttgtgttctaaaataaagaaaagcgtacagtaacattcagcttcaacaatcctcctaaccattgtacagacagtagagagttaatctgaaacctaatcttccatctggaaactcaaactcagtcgactggtaaagatatgttgatgtcagtggctgagtttctcggcatgtcctgtccgttggtccagctggagataccgaatgaagatggcggctgctctctgtccgggtttgtcggtgagaaaacagaagccgccggaggaggaggagaaggaggaggaggcactgacatgactgctgcaggggcatgctcgactctttgcttcctcggtttctgatgatcttgttgatcactcgttataaaactgccaacaacaacctgtgtttaagaaacaacaaaacttgatgagatgagagacgatttcaagaaataacgtaaacgttgttgttagattcatgagtcacctgaataggagtggcggcaatgagcaggccagcgacaccgccaccgacaacacgaccatcaggaccggccaaagatacactcatgccaccagaccgaccttttgaaccttgattctctgtttccatgaatgaaccagacagagacagtatctcaaaccgaccctgcaagaaaccaacacattataatatgacactttcactttctctctgatagctttaaatggagtgtgagagacaaacctcgtaggtgagagtaccaccgcaagaatcgggttggcgaagagtaacgtttgatatcactccatttgctgataagatacaaatagctcgtggtccttgttgtgaaaaggagatgattctcatagtaatatccttcaatcaaaacaaagcaaacagagttgttgctaagtaacaaacacaaatctcctcccaagtgaaagtttagggcctttttcttctaatatacatacctcaccagtgttcactgtgattacatgcggcgtgaaatttgatccaacaccaccaccaacaccaccaccaacaccaaacctttcacctgcaagacaatgattcaaagttacaatcttcaaacaattataatagatactcactcaacaaagttaaagcccatatgctactttaaacaaaacaaatgcaacttcttgagaaacttttaacagttgttaataatctttcataactttatgcaaaagaccaagtaatgttaataatcaaacagacaaaggaatgcttagttaagtagagtgacaaatggaagagtaactttaccagaagaatggaacccaatggtcttatgcatcttcttcatatcaaaaccattgagcttgcctcttactcgtttcttcacaagaggaactgatgaagaaggcaaaggagcaccattagcttcatatttacgaggtctgcctctcctcttcttccctgaggcttcccctgaagaaggcattggggcttccatgggagggagagacaaccccataaactggttagcagggctatctgaaggtctcggagccatatgatacgctgatggaacttctgctcctataccaccaccagggctaattctgtcgcttgtttccattctcaaatcctatccttaactgcaattacaagcaagccaaaactttaaaagagagttcatcatccaaccacatagcttcataaatatagaaacttgatttcgaatttcaagtaatctcaacaaatgtggtaatgatataacgctgagacttaatttttgtaaaggcttctactttttcacagttagctacagagttggaagaagtataaagatggaatcttttgttctgttacactgaaaattctcaaattgtacatcataatagtttgaacaggaaaaaaaaacaacacaaggaggttagaagcaaaagtacaaaaataatgagatctcagacaaaagtgtttaaaagaaaaacagagacctgaagctttatgtttggtctcaacacactgaagttgctctatcagtcaacagtcaacgttcctcagccgagaattgaactaaacacaagaacagatttctcctggtcagctcacgccggagaagttctcaacggtattttccgggaaaaaatcagatttatatgatccaaacaagaagaagaaaaaaaaacatagtgtccccagttgaaaacagagtagaaagaaaacaaaaaaccagatcgtaaaaaaaaaaaaaaagatgagagaaaattaggtttttgcaagaagaaatatccaaaaataatttatctttttttttgtcgttaagaataagaccgacagtgaattttggttaataaataatttcacgtccggaattgattaaaaaaaaaaaaaaaaaaattgtcccgtttgcgtaagttttcttcttgacattaatatctcttattacaatttaaaattcaattattttgcaacaatatgtttatgttggttcacacaagagtttactaggaatgtgattggtaggtgacagataataaagtgacaagcggtcagattaacaagccgtttgtttgaccttctctgccttctgtctcctttttgactcactctgactctttctcttatattgctttcacttccaagaaaagaatagagcatttgtgattttaaatcattgtgtgttaaataagaatttatccgtatctcaattaggatcacggcacatgagaaagcttttggatcattcattacgtgtcaacacatctttccttgagttcaaattaaaatttcgaggcctcgagaccaccttcaccactattatatattaatcacccctgtatatttccaagacaagtgattaacgttagctttattacataatgtttttagtcacacttgaagaaaaggcaagtgggtttggatgcaaaaggcaagattttaacataagcccatttggggattttgggccttaaccttttgggcctgtattacctatgaattacacatttaacattttcattattggaccccaataaaatggagcaatgccttataataaaatagagggacatgggtgtcatgtcgacgtcaagcgtgagatgtgagatgtgagtttgcactgcaaatccaatagaatctattaacgccccttttaagttacagggcaatccagttagtacaaaataaagagttcctaataaatgtcgcaaaggttaacatggttatattaaagaagatggtcggtatttgcctccggtcaaatacttagtgaagaactcacgggcaagagcgttaagatcaccgtcctcatccactggattttccaggccaaagaatgtgctaagatccactgactctgttgggacctcaatagcttcttttggctgttcttgttcttgttgttgtgacatacaaggaatgtgtgacgacgaggaagacatattgtctttgctatcgacagaagaaatgagtggcacattagatgaagaggctgcttctgtccgtgaattgttttgagaattcggcggaggaagaccttgtaatgttgagagttgagtttggacgtaagctaactccgcctgtagattcatcacctgttcacatgtgggacgtttatttaattaaaaagttcatataacattagtttttaaaaaacctaatttattcgtattagaagaaaattttcaaactgttttattcaaccgatatactattaaagacaaacaagtcggaatgtaaccacaaagaatgacgatttgactttctttaacgctgttttcgacaaacgagccattgggaagacacacgttagctattttcaatattagcaactttgactcttattgtggaattagtactatgcaattttcaaaactaataaacaggaaaccaagaggcgattaaatggaactgttataaaagtaacaagttacgtggctaaaagatgcggatatataaatctcatctttaacctaatgttatgggatgattttattatacaatgaacttctatataactaaatacacgcatgcatgcatagtaaatctttcaatgtatatagatcatcaaacatatattatatatacataaatatgtgacaatattgggttttatatagttgaatacctgatgttgaagggcgaagatatgaccaacgcatccgtagacgggatcgcgaagcctagccaatgcctcgtaagtaagcgtgacgacagcgtccagtctccggctggctggaatcatcatgaggagcttggaggcgttgctcgccccgaaaaccttgtgcacggccgtgaaatgagacgtcccttccaccgaatcaaagtagggagcgaagacacagtcagcaacgcatttccgtcggagaaacttacatgcgccgcatggacctccacaaccggtggtgcttccgctcatcttttatgtcaaagacgtaacgttttgtttgggggaagttgtgtcgtcgtcgaccacagttattatatatccaatccaaagagatgtttaagagagagagatggatgggtttgtttatgaataaatgtttttaagttgatgtggagcatagaggatcgtgtcaggcaagaaaatcatgtcttgcttttggtggtgggtcatttataatcattacatttttctataacttgatcatcttttcttttgtatgtccatatttttgttttttgttttccttggtgtgtttcacttttctgtacatagttgaatcacacactcaagaaacaagctattttcaaacaagtgaaagaattatctatttatggactcctaaaatcaatgaaagcatataacacaaggagggataacatatacttgtaaattgaaaagtagacaaatcaacaatatatatcatctaaattagcaatcataggtttaagacataaaaagattttgtatatgccactgagaatctagaactaactatcagtctatcacacaagcaaggcctagaaagtagtgaacaagtaaggatttagaattttagatagtgagtaatgaagatatatataggctggtgggttcagttaacaaggtactaaaatcggattataacgagggatcaagtggtggggattatgaattattatagtaatgagaatgaatgtactagtactaattagaatgagtaaagcttggaagcaacggcagagcagatttgtgatatatacaaaggacaaacaaacacaaatgctttgcgtgaagcaaaacacaattagctgcttgctgacgtatttctctctcaccactcagccgcaggtttccctgtcacacacacgtgcgatccctcaccacacgtgtgtaattcttttatatatgttatatactgtatataattttttgtcaaactagttctctatggacagctttcgtgatagaattatagagagaaaatcgagatgtatgttgcttcttgtttctacaaatcgtatagtcagaaacagacatgacactgatcactgtttgcttcccccgcaagtacaacctcagtcagtcagttactgtcatgtctctctttctctctgtttgacaagatccctgacccttgttcacttccctaatttaaagccttctccttaatgggccgggccttgtatctgtttcggatccttctttatagcgaaatgattaatagtagtgattacacctaaaatgtacgtatatgacaaaaagaatagtttttttcttctgtttctcttgtactattaggcctagtgaatgtattaaatacaaacagtgtacattagcgtacgcaagcggtgaggaaaggagcagaagagggcgtgatacgaggacacgtgtctcatgttagtacaaacaaagattggacaagagccggacggcacggtgacctctgtcaacaactgttaccgtttcttctaatctatttgttaatctcctaagtaatgtaattaattagttttcactgttcataattaatcaagtaataataacataagaaatgaaatgggagcgttacttgtataccatatgcactcgcaaacgagccattggttgcgtcagaacggttacgttcttcataaaagtcacattcgacacatggcgatcatatatacgtgccaatttttccggttctctcaaatccaatcccggtttctttcttttatgttttgatcaccggttcttcttctaaaccaacttagctttactcatttggtgattattattggaccgtcgtaatcgtcactcttttcttttttgaatcaatgatgtgagatatgtatattatacacgcacacgtacacacgtgtatttgatcattcttgccgtcaccaaattttaaactcatttatcgtgtaataatatattggagatccgcactgactagactatacattacatagatcttgtaatttcggaaagttcaaatatttgtgaaatatatgcactagttggagtttccttatttgtaccttaatcgaatattgagtaaacatgattccctgacccaaatatagattgcgtacatcaactcattaataccgtcaataaatacgagtttttgcatataatcattacatggtcatatgtaataaatctagttgttttggaaattgcatattctctccctccctctttatcaattttacatatatgtagcatcagcaatatatgtgaatttgttacattagtagtttagtttgtattttaattttttggataaattatgaattctattaccaaaattgaacattgttttttacaaatactttggggcagtgaatttctaaaaccaaaaaaaaaaagttagtaatttgtataggtattatcgccgtggtatacacttaattcaaatatcataatatacatgttcgtgtcatatacgacaaaagtaaaattaaagtttgcaaaaaaaattttatttaaagaatctaacggaaaaaaaccgcttaaattttctagaaaatgttgccaaatgttgataaaatatccgattaaccaaaaagaaaataacgcatagcggtgaaccgttacatttcgactacaaagttatcacattaaaatcaccgccaaaaattagtaattaattagattatatatatatatatatatatatatatatatatatttaagctcattttatacatttatttgtttgtaaaattaatttctcatagtattagattgaatgttcatatattacaattggtatataccataagatagttgtgtggttcgatgtaacaaaaataaaattaaaccagaagtagaaaaagtgaaggaaagggaataacaatgaagaagttgaaagatatggaatgttttgcttcacgcaaagagcttaacacgagacaagtacgctccatcgcgttgctttgaagtcttttttttcttcttcttcttcttgtcttaacctcttttttattttttagtcttggtaataacaagactaattaaattattattttactttttttattatctaccaacaaccaaaccctagttttgcttacgtccgatctcctccttctctcttttcttctctcccaaacgttccctttcttttttttctctaatcacgaaccaaaaagcatcataatctcgatgagttaaatccatgtatctcaaaaccctaatcaccacttagctagtaaaaggaaaggaaaataaaaaggacttgtgtggtagaaaaggaagatgagcagtagcggaaaccctagcagcagcagcggtggaggaggaggaccgtgcggcgcgtgcaagttcttgagaaggaagtgtgtcgctggctgcatcttcgctccttactttgactccgagcaaggagcggcgcacttcgcggcggttcacaaggtgttcggagcgagcaacgtctccaaactcctccaccatgttcccgagcataaacgaccagacgccgtcgtttcaatctgctttgaggctcaagctcgtctcagagaccctatctacggctgcgtctctcacatcgtctctcttcagcaacaggttaattattcttttcataacgtttaattatatgattagtactatttatgatgggaaattgcaacagttttaagttgatctactgtctctatatcgtcacgttgatcattttattttaatcattttctatgtaattatgtttttaacttcttctttttttttgaagaaaattgcgttttcaaactttttttttttaaatgagatttttcattttgacttaatgttcaattaaactacaaagttaagtactttttcccattctatggatctcctctgattgtcatttctaggatcatatcccatcatgcaatgatgcaaattaccctttcttatgcatcgatttttttttttaattcattccgatttgttcttttaaggatgaatattttttgtttttgccatgatcgaaaaccaactctacattaaaataagagttttaaaaatctaaaattttacaactgggttcatggcctttgccttttgggcaaagttatgtctttatattaaatgtcgtgtctatgagtctatatttatgtgatatagaacaagcttatcttttgatttacacttttagtaatagtagtttgttaagaaaacatgcataaagcataattctatgtgtgtgtatttcacttcacatatagcatatatatgaaaacttctctctatttcctagttaaaatctctacagtcgtagttaattggctaggattaaggaagttaagcgatcatttagcacatatgtattgtgaagttttgttgaatgtttacaaggtttgtttccaagtgattgagatgacaaatcttcctctgttcgcaacaaccacgttgttttacacttattcccaagcatcatttttttttttggtttatcttttaattgcaatatacatatatagtacacacatacacgagatatatacaaacgtatgcaattgcattctataaattgatgttagtgaaggatatttccaatattacaagcaagcatttatttatatgttatgtacaatgtcttttgtgttataattagattgttttattcagcatatatttttctaaatcggtggtcttgattgatcaattactcctgtcgtgtttttttggcattattgaatcaacaacatttgctcgaattcggaaactcttccaattattaaagattgctgaaaatatcattttatctagattcttatcactctttcatatttgttggcattattatccatttcaatttcgttataaaaaaaacaggtggtaagtttgcaaactgagctttcatatctacaagcacacttagcaactctagagctgccacaacctcaaccaccacaggttccggtgtcatcttcaggatctctacaggctctttccataacggacctcccaacaatatcaccgtcggtgtacgacctctcctccatcttcgagccggtcatgtcctccacttgggccatgcagcaacaaccacgaccgtctgatcatctcttcggcgtcccgtcatcgtccaatatgggcggaggcggtgagctccaagcactggcgcgtgagtttattcacggtgggcaaatgccagctcagccatcgccgggaaccagtggttctgcctcgtcagtgataaaacgagaatgaagttatttttatcgtatgtttgtttatttggaccgtaagagatctatagttagccatatgtttctccttgtaatatatatacttggtcgaattcgtatttaaattgttgtctagaatgttaatataagaactatatgatttacattgattaaatggagtatcttataggccaatatgttgaagttgctttggtctcttggaccatcgaatatgttgttttaatcagcctagagtacaccggttctccacaacttgggtggaatcttgagcgtgaaggaggcttgattctggcgcgagacacgaaccaatgagtctcatttctcattttccctatcacttatattgggccttaaatgggttcaataaagtttttttttcttatatcaagcagcccaaaatattatttaaacccgactcaattgagtttgatactctggtttgctttgtagtccacactattttaacaacatcttcgaagcatgcatttgatttaacaatcttcctaatttactagagaatttgagccaattttgtcttttttttcaccatttttataaaagctggttttcaacttgtgttctcttagcatttcccgcctctacatcaactagaaggccctacacggaccttgaacatgatcttagcgatgtctaaggactaagctacataaaccaatgagtaaaatacatatggattggacaataatcaccaatcaaaaccccaacgtcgattgcatagccgataagtagtaccacaatggtgagaggaggatagtgccagcggctatgaagggtcgacgtaaaccaaaccttgatgagacactgtaaaacacgactattggttgaacaatcagttccaatcgaggctcacaaagtcaaagcatgcttgtaagatatttggagtaattgaaggtacggtgtaatcagagcgtttcttgaattgccgaaatgaagtttagccctatggctatagaagcaataagccatttttatattcataactttagaggtattaataagaaacatatataaatttttttataaatgtattgacaaaaaatcaagtaaaaataagcaagatgcaaaacataagcaacatttctaattaatattatataattttttataatgattttatacatgaaaaaatctctaattaatagatatgacacatgtgtgatcatgtgagttatcaattttgaataattttttaatactaaattgacatattgtttgatcagaaaatgtcattttttgaaactaagtgaatgaataaagggttgagctaagcaatatataattgttgatgatgaaataataacatgaatacaaattatatttatatgtgtgtatcaattagtgtaatatttaagagagaaccattggagtagagccttacaagacaatatatgatcaccattggaaaactttaaagctattactatggtaaaaactcaattgcttgaattcgaattcaagtaatcaaaatcttattattagctcaaatctcaagttcctattactactctatacatatacatgtgtattaatctatgttatcaccaaaatagaaacaattagatatagcaagtgaccactattttccttctaagacaccatacgaactaatttttatcaaaaacaaattatcaagctctattacaattccgcatgtgtgctatacattagattaattaaaagaaattaaatctgttttcactccatttatcaaaagtaacatctttaacgaatcaaacccataaggtactcttactctctattaatagaggagaatgtgtcatcttctcattactcaataagcatacttatcatatacacaataccacaatgataaggtcaaaatgttcttgccatcatcatctacttgttcttgttatggttgttctttggatatcaccaagatatgcttcagccgaagatgaacatgcaaaggtaatgattgtatacaatctctttgtttctccagcttctttgtcatcagattgaacaaaactttatgttgcaaggagaatatttactcttgaaatacttaatcatataaaggatttctatatcatatatttgggagatcgaccggataatacagaagaaactatcaagacacacataaatcttctatcatctttgaatatcaggtacatgtcattcatcaatacatgtataagacatactctaaaacatataaatgcgtaacgttttatggagtaatgttctacttggttgtttgctaatcaaatttataacgtctcttgagaaaacagccaagaagaagcaaaggaaagaaaagtatatagttacactaaagccttcaacgcttttgctgccaagctttctccacatgaagctaagaagatgatgggtacgtaacattatttgtttttgatatttttcccaaaacaaagcactagctagtgagattcatataactcccatccatgcactggtgcagagatggaagaagttgttagtgtatcccgaaatcaatatcgcaaacttcacacgacaaaatcttgggattttgttggacttcctttgacagcaaaaagacatctaaaagcagagagagatgttattattggtgttcttgatacaggtttatttttttctatatgcaaattgattcgatattattcatttatgcttcttataatttatctaaaccttcctataatacaacaatcaggaataacgccagactcagagagtttcctagaccatggtctaggacctcctccggctaaatggaaaggatcttgtggaccttataaaaatttcaccggatgcaacaagtatacaatttatctcttaccattttctactttaatcgattttaaatacaaactttgatcactagagaatcttgatctctaagcaacatgaactcttgagcaattgttaaagaaaatgtcattgctagaaaaacaaataaggagttagttgatgaatttaagagtttagggagcaaattagaattatgcgttaacataaggagttagttgatcaatttaagagtttagggagcaaattagaattatgcgttaacataagggttctgattgaaataataaatatttaattaatgtaacttcaacagcaaaataatcggcgccaagtacttcaagcacgacggcaatgtgcctgccggcgaagtccgatcaccgatcgatatcgacggacatgggacgcacacgtcatccaccgtagccggcgttttagtcgcaaacgcgagtctctatggcatagcaaacggcaccgcccgcggcgcggttccgtcggcgaggttagcgatgtacaaggtttgttgggcgagatccggctgtgctgacatggacatactcgccggattcgaagcagcgattcacgacggcgtagaaattatctccatctctatcggcggtccaatcgccgattactcttccgattcgatatccgtcgggtcgtttcacgcgatgaggaaaggaatcctcacggtggcgtccgccggtaacgacgggcctagctcaggaactgtaacgaaccatgagccgtggatattgacggttgctgcaagtggaatcgatcggacgttcaagagcaaaatagatctcggcaacggcaaatccttctctgtaagcatctcaaaatcaatctcttaattagctaaattcaatttagggttttgacataattggatgattgaaaggggatgggaataagcatgtttagtccaaaagccaaatcgtatccgcttgtaagtggtgttgatgctgctaagaacacagacgataagtacttggctaggtaacatcattatcaccatcaacttcatttgaatatgttaagagaaactaagacattgtttgtttgatgatgtttaaggtattgtttctctgattctttggatcgaaagaaggtgaagggaaaggtaatggtgtgtagaatgggaggaggtggtgtggagtctactatcaaaagctatggaggtgctggtgccatcattgtaagtgatcaatatcttgacaatgctcagattttcatggcacctgccaccagtgttaatagctccgttggcgatattatctaccgatatatcaactccacaaggtcctctttgatattcttgggtatgatactatactacaagtgtgttcacagctaagtaactctttgtttatgcttttctcagatcagcgtcggctgtgattcagaaaactcggcaagtgacaatccctgctccatttgttgcttctttttcatcaagaggtcccaatccgggatcaatacgtcttctcaaggtatatatgacttgatcaatgtcatctgtttattgatagatgatgatcttatgtctctgccatttttgcggattgtagcctgatatcgctgcacccgggattgatatattggcggccttcactctaaagagatcactgactgggttagatggtgacacccagttctcaaaattcaccatcctgtctggcacctcaatggcctgccctcatgttgctggtgtagctgcgtacgtcaagtcttttcatccggattggacccctgctgccatcaaatccgccatcattacctcaggtaactcacgtcaagttctcgtgaaactaaaagcagagaaagcagtaattatttatctgtttgttacgcagcaaaaccgataagccggagagtgaacaaggacgcagagtttgcttatggaggaggccaaataaacccacgacgagccgcaagccctggcttagtctacgacatggacgacatctcctatgttcagttcttgtgcggcgaaggctacaacgcaaccactctagctccattggtgggtacacgctccgtgagctgttcctccattgtccctggactcggccacgattccctcaactacccaacaatccaactcacgttgagatccgccaaaacgtccacattggctgtgttcaggcggagagtcaccaacgtgggaccaccgtcgtcggtctacaccgccaccgtccgagcaccgaaaggagtagaaatcacggtggagccacagagtttgtcattttcaaaggcttcacaaaagagaagcttcaaagtggtggtgaaggccaaacaaatgactcctgggaagattgtgtccggcttgctcgtgtggaagagcccacgtcactctgttcgtagccccattgttatttatagtcctacttcggattgaaattaatcacatctccaaaacaacattttacttcaatgtaatcctctcacttgttcgtaaactaactcattccactgcttaatttgaaaaaaccactgtattaaacttataggccaataagcccatattagaatatttgggcctttgggcccattacacgaaacactacttacagaataacctctacctctctctctatcggaaaagccctaaagcaagcttctctccttcgtcgtcaatggaagcttctctaccggaagaggtgcttcagccgcttctacatgcttcagatttatcatactctctagaagattgcttgaaatttcttctagagtcttccaagaccgattcaggtcgttccgatctcgcttccaagtctatacttccgtcgatcctccgtcttcttcagcttcttccttacccatcttcccgccattatctgaatctctctctgaaggtccttcgaaacctctgcgcaggtgaggtttcgaatcagaactctttcgtcgatcatgacggctctgctatcgtctccgacttgcttgattccgccattgcggatttcgagacagttaggttcggattacaggttctagcgaacgttgtattgttcggagagaaacgtcagagagatgtgtggctccgattttacccggagaggttcttatcaatcgctaagattaggaaacgtgaaacatttgatcctctgtgtatgattttgtatacttgcgttgatggaagctcagagattgcttcagagctttgtagctgtcaagggctcaccatcatcgctgaaactctacggacttcctcttccggtaacactcttattcctgaagccaaaaatgccattttgatcttaaagtcgtgatttttatctgatttgagccaatcttgttataattgtttgtagttgggtctgtggaggattattggctcaagttactggtttcgagaatctgtgttgaagatggttacttcctcaagctcttctctaaattatacgaagatgctgaaaatgagatattttcatcagagcaagcctttcttgtgaggatggtgtctgatattgctaatgagcggataggaaaagtgtcaatccccaaggatacagcttgttcgattctcggattgtttaggcaatcagttgatgtttttgattttgtttcgggtgaaagatcggagcttccaacgggttcaactatagtagatgtgatgggctactctctggtgataataagggatgcttgtgctggaggacgtcttgaagaactcaaggaggacaacaaggattcaggtgatactgttgaattgctcttgtcctctggactaatagaacttctccttgatctgcttagtaaacttgatcctccaacaacaataaagaaggctttaaaccagagtcctagttcttcttcttcttcattaaagccgtgtccttacagaggattcaggagagatattgtgtcggtgattgggaactgcgcgtacagaagaaaagaggtacaagatgagatcagggagagagatgggctctttttaatgctgcagcagtgtgtgaccgatgatgagaacccgttcttgagagaatggggcttgtggtgtataagaaatttactggaagggaaccctgaaaaccaggaagtagtggctgagttggagattaaaggctctgtggatgtgcctcaactccgtgaaattggtctcagggttgaaattgatcctaaaacagccaggccaaagcttgtcaatgacacctgaagcttcatttgtctcagggaaaagaggagctatacaatacacaacaagaggtccttcttgaggcggtgaagatcataaagaagcacggtgtgtcgctaggtaccacctgggacaattctacattgtgagtgatcattttgtagagacaaggaatactgatccggaagctatctagctagatggatccaaaactctgtgtttttgggaaattacagaaaatcgtgatgacttcttaggtttcaagagaaaaatgtttcatattggccttgcttttatttgtttccttcttggtatttatagggttctaacaattcctatatacatgaaatgatcaattcaatatgttaagcagaaaatggctctcgtttgatgtggtttgcagtgcatgatcaattagttcagctcaacttttgtgaagcctttcatgtctgttggtttgtatttaagttccttgttgtaaaccttctaagcagttgttgtgtttcactttctctataatagaaaggcaagttcttctctatattgttctgttgacgatcaaaccaattgtgatacaaagtctgattctctttctctggtgttctgtttctagaaggagattcagtttctaacaaggttcactgcagtcacaatttaccgatatgcagtcttttctctgtttttagattgttatgtttgtttgagcagaatcatgttgaaggttttctcgagatgtcagcaaaaacttactttaccacggcttgcagacttgtacatgaaagttgatgatcaaaccaggactgattgattgattgattatacaaatgaaaccaaaagttccggaaaatactctgtgataagaatcttattgctccctgttaacatatggttcaatataactccagaaaaaaccagagtcgttggcattgagcattgttgtgtgtattcaggaattgtttgatagtctgatttgcgtaatttttcagtcaacattgagagatctaactagtttgtttgatgttgcagtaccaaacatgtctgattcagaatggcaaacacatgttctggaatagaaacagattccatttaataaaagataaaaccattatcttaacatagaggtatcataagataaaccagaaacatagatagaacaaaagataaccaaagttgcaagaacaaactgaaatgagacgttaatttagcatctaactggatgatgatgcttcaaagctttataatccgcttactcttccttggtttctcaagggcagattccacatcataaccccaaatcattttcaaccactcggaacttttctggtatagaggttccgaagaagacggatctttatcgtaaatcctctgttttttctttaatttcttcttcaaactcttcatcttctctatgaagtcttcgtcaataacagtgcttatgtattcatggacgacgaattcgtatgctccgtttatatcatcaacaggattcttacctgttacagatttgaaatccaacataccttgtagcacaaggacctcatctttcgaactccactttaacatttgagaattctccttttttgcatctttctttgattgtttggcactcacgttcttccgcttcttcccagttagcttagcttcaccggaaccaccacaaaccttggaccggttggtattggctttgtccattatcagacggttctctgagagaaaaagagttcgtttttagggagaaaaagagttcgtttttaggtttcggctgtttttagggttcggctatagttactatatatcattagtacgtttaacctaacgttttagtaaactctcatgccagggcctttacttgcggaaaccttcttgatggaccaaaagcttctccttcgatgatctccttttcatcgaatatacgcctgcatagtgatgctaagcctttcaattacttaagccattcgtcgtacgcacgagctttcagctccaaatctgatgatttcggaagtattgtagcatctggtgttactgggtctggtgatgggaatgggaatgattgggttgagaaagctaaagatgtggtgcagactagtgtcaatgctgttgctgagactgcaaagaagactaaagatgtctctgatgagatgattcctcatgttcagcagttccttgactctaacccgtatctcaaagatgttatagttcctgttagtctcactgtgactggtactttatttgcttggatagtgatgcctaggattcttagaaggtttcacacttatgctatgcaaagttccgctaaactgcttcccgttggcttctctaatgaagacattccttatgagaaaagcttttggggagctttagaggatcctgctcgttacttggtgaccttcattgcttttgcacaaatgtgagtctctctagctttattcctttgacatgtatgttgtagaaaatagatagacttgatgaatgtgatatgctgcagtgctgcaatggtggcgccaacaactatagcagctcaatacttttccccgactgtgaagggagcggttattctctcagttgtgtggttcctgtatcggtggaagaccaatgtgattacccgaatgttgtcggctaagagttttggtgggcttgatagggacaaggtattgactttagacaaagtatcatctgttggtcttttcgctatcggtttgatggcttctgctgaagcatgtggtgtagctgttcaatctatcttgacagttgg

SEQ ID NO: 502 - DNA, 111906 bp, Arabidopsis thaliana
gaattcgtatgctccgtttatatcatcaacaggattcttacctgttacagatttgaaatccaacataccttgtagcacaaggacctcatctttcgaactccactttaacatttgagaattctccttttttgcatctttctttgattgtttggcactcacgttcttccgcttcttcccagttagcttagcttcaccggaaccaccacaaaccttggaccggttggtattggctttgtccattatcagacggttctctgagagaaaaagagttcgtttttagggagaaaaagagttcgtttttaggtttcggctgtttttagggttcggctatagttactatatatcattagtacgtttaacctaacgttttagtaaactctcatgccagggcctttacttgcggaaaccttcttgatggaccaaaagcttctccttcgatgatctccttttcatcgaatatacgcctgcatagtgatgctaagcctttcaattacttaagccattcgtcgtacgcacgagctttcagctccaaatctgatgatttcggaagtattgtagcatctggtgttactgggtctggtgatgggaatgggaatgattgggttgagaaagctaaagatgtggtgcagactagtgtcaatgctgttgctgagactgcaaagaagactaaagatgtctctgatgagatgattcctcatgttcagcagttccttgactctaacccgtatctcaaagatgttatagttcctgttagtctcactgtgactggtactttatttgcttggatagtgatgcctaggattcttagaaggtttcacacttatgctatgcaaagttccgctaaactgcttcccgttggcttctctaatgaagacattccttatgagaaaagcttttggggagctttagaggatcctgctcgttacttggtgaccttcattgcttttgcacaaatgtgagtctctctagctttattcctttgacatgtatgttgtagaaaatagatagacttgatgaatgtgatatgctgcagtgctgcaatggtggcgccaacaactatagcagctcaatacttttccccgactgtgaagggagcggttattctctcagttgtgtggttcctgtatcggtggaagaccaatgtgattacccgaatgttgtcggctaagagttttggtgggcttgatagggacaaggtattgactttagacaaagtatcatctgttggtcttttcgctatcggtttgatggcttctgctgaagcatgtggtgtagctgttcaatctatcttgacagttggtgagtaacctagaactcaacaatgtgagatattagcttattatgatttgagagagaatgactacttcttgttatatatagaattctttgttttgtgcttctatatctctctgctatatttgacattcctcgctacaagtttaatgcaagtgttacagattcttgagttttcttgagcaacaagtaaccttcaacttcttcttaatgaattacagtatgatataggtagtgaggaaataccacaagaaaccttcattttatcttcttcttgatcagaacccgttttcatgtacgctaactacggtaatttagcgaaagcactcgactttgatctttatcttcaaaactccattcctgtccaagtatggagtgaagaagagctggcttggggacccttgtgctccagtaaaatacccttggaaggatattaactgcagctatgtcgataatgagtctccgagaatcatttctttgtaagatcctcttcaaatgctcgtatatgtctttgatctgtatgtcttgttctcacaagagtttgttgatcttcagaaatttatcctcgagtggcttgactggagagattgatgcagcgttctcaaaccttacattgttacatattttgttcgtatttttcgatttcatatggaattcttttgtatacagatttgtgaaactgatgcaaccaaaatttcattacaggggcttatcaaacaacatttcaacaggaaatgtagattacatagacactgacttcactataacttgaggaatttatattcatatcacatatatgtctgcagaaacttggaaggaaacaagttatcgggtgctatgtctgcgtgtctgcttcatgtcaaattccggatgagaagacaaaaaagagtgtgtacatcattctattagcagcatctgtcacgggagtgcttggtcttgtagtagcaatagctttgttcttgcagtacaagaagagacatcgaaatggtaaaaacatcaagaaacgatcctacattgcttcttctttgatttctaagtttacttggaagaaatattcttatgagatctttacaggtggttctggtgatggcgtcaggactgggccaatggacacaactaagagatactacaaatactcagaagttgtgaaagttacaaacaactttgagagagttcttggacaaggaggttttggaaaagtatatcatggtgtcttaaatgatgaccaagtagctgtcaagattctttctgaatcatcggctcaagggtacgaagagttcagagcagaggtaactctcttatacactaagaggtttagtctctattaagtgagttctgtagtaatcgggatatccaccaacttgtgtatgatcaggtcgaacttctcctgagagttcatcacaagaacctaaccgctcttatcggatactgccacgaaggcaagaagatggcgcttatctatgagtttatggctaatggaaccttaggagattacttgtcaggtcagtctatttgctactttgttttggtcactggtcttttgctgctgtagacattgttttacaaaatgaaggtaccatttgaccgcaagaattaagcgagaaaagtgatgtttagagcttcggggttgttcttttagaggttgtcacaggccaaccggtgattgcacgttcaagaacaacagcagagaacatacacataactgagtcgactttaatgctgtcgacaggagatatcagaggcattgtggatccaaagctaggggagaggtttgatgctggttcggcatggaagatcactgaagtagcaatggcttgtgcatcttctagttctaagaatagaccgaggatgagtcatgtagttgctgagctaaaggagagtgtaagcagagcaagagctcaacaagtgatatgaaattgggacagtagttagtagtaaccacaacatgtaaaaattcaattggtatgatagctaacaatctcccacattctgttgtgtgtttctttgttttgtaataactctggttacgagtagagagacattcatataagaagcacatttacaaagtcttaaaagttcattataaccatagaccaaaaggctagttagacaacttagctaattcattacaaccatcgaccaaaaggcttgttagacaaagctaattctcacacgagaatccaaagtcctaaaagttcattagagtagatagaaagatgaagcctaagatagataacaaaataaggcattacatcttcattaaacccgagattaaacggataaacatatacaatccaatagcttcctcttcttcttcttagttggtttgagtaagcactgaagtcacctccttcaaaacatccatgttcgccaacaacaactcacatttcttagcatccacaagcttcatcttctcttgaatcctcttcttagtctccacggacaccttgctccacttcttcttcacagaatactcatccaaaccgagactagcgataaccggaacaagaaaagactcctcaaaccactccgaatcttctccaagaatcacgacttgctcatcttctttaaccaaaggtttcacgttcttctccttgctattagccttaacaagaacagattcatctttcactttcttcttcacaggagtttcaaggctcacaccatcagatccccaaaaagaaacagccaaacccaaacacttcttatcatgatccgattcaacacttctcaccttccggtcaccaaaatactttctcttaaagcttctaatcttgtcaaagaactggactttactaacatcaaagcttatagatttcttggcgatatcaaaaaacctatccttatgatcccaaggacttgtacctgtctcagctttgaaatcgatcattgcttgcaggagagagatctcgtcttcttcactccatactctctgagcatgcccctttttgttatcgccctctttcttaattcttttgacatgcatgtcccttgacgtggttccttcgctagctcgcttcttccctgacttcaccgccggtgattcagtagcaccttcgttattccctgacttcactgccggtgattcagcagcaccttctttcttccctgacttcactgccggtgattcagcagcaccttctttcttcttccgcctggttaagacgaatgactgcttctctgactctgagtcatcagaaactgccacggcggcggaaggagagtttagggtttttgttgacggaacagtgacgggagcttctttgggtttgctttctttagaagaagagatctcttcagaagaactctcaaattcgcttgaagaatcgattgctggattttccaaagaagccattggatttttttcggtatgatgaagaagagtgagtgagagagttactttttttagggttagtgagcggcgagactttttttcctttaacgctgaacattcttcactctcttttatatttaacaaacaatctaattaaacaaagcccaacaacaaattaaggttgttcgaatgttgtctgctaagagttttggtgggcttgatagggacaaggtattgactttagactaagtatcatcggttggtcttgtctagtgttctccatttcatattagtcgttttgctctgcctataatgttcattgctaggattcaacagagaataaaggctacaataagcatatagtcttatcttcttcaggggttgctaacattattagtttgaatctgatacgcatggtacacactctctttagtctctgtaacagtcttctcattttttgaatgatactactactgctagagatctttgccgttaaatatagacaaagtttagtagccaggctaggcttggacattcggatttcgaatcggatatattcggattcggatcattaggataggagaacttattatccgtacggattttatgaattttcggatcgaattcggatcggatattttcggattcggataatttggatagaaaatttattatccgttcggattttactaatctttggtttggtttttgttcggataagtgtcggattcggaccggtttttaaagagctaaaaattgttcaacttaaataaaaattggtttaatctttactaaaatttggttaaattttgcaaaagtatgtatactattaacaaatgtaactaaaagatttccaatttctttattatttaggatattttgttatttattataaaattacaactaaatataaataatatttttggatatatatatttttcagttttcggatatcctctcggatttcggttcggatcggattcggttcgagtaattcggataggagaattcattatccattcggattttgtaactattcggttcaagttcggttccggatcggttttcggatttcggattttatagccaggccaaagctttttcatgtacatgatttcttattctaaatagaattaggattaagtagcttctttttacttgttattcaaacttgaggagaaacatcaaactttgtttatttacaaagtctgatcaattgttgtttgtttacacatataaggtcttcttaataaatgcgactctgcttatgattagatagtgagattctcctgtatggctagaaaggatccaacaacgtttcctccgacatcagggaactcctcacttcctggaagtggtcggactttgcctttccgatcaacttccaccggatatttcatcagatgtcctctcatctccgacacttcctcactcctaaactgttcccagttctcctccgccactgttctcactttccttacacaccctagactctctggctccacaaagcaatcatctagcagtgccatgtgttctgcccaaagcgacattctatatccgtagatctgcagattatgtaccaagtattattgatacgactaggactatgaaaccatgtgtgtactatctttgtgtgctattacctgaccccgaggacctgactgtcgtcgtgcccatgtatgttgaggctggtaagctcccattgcaatctctgtatctcttgtcccctccattgatctttggtttatgtttgcagatccaattaccacatactcatcatcaacaaccatcccttttgaatgaacatatatcataaatcttctgctctttcgacataatccctataatacagtttcaatcaaaactcatcaatcaatgacgatagaaaccgcattagcaagtcaagcagtttggttttgttacctgaggagtgttctcgttgcttgcacttcctgtacccgattcattatttccgttcaccatttctcggtttccaagacagaagaaattcaaatagtcttgtggggagtattcatcttcaagcccggcctccactaacgcattgtagatagttccatacatcatttgcatcgtcttgtgctgcaaagacgataactatgacatttagtttcacaatcttctagtgtctacttaaatgatcattgaccaatttttgaggaaatattaagggaaagatcatgatatcaatattgtcacatggactaagacagagaaggttaacggtttgcaaagacacaacttcactagaattacctgccaatatagaattctttgtgtagcggcgccggtaggaactccttctggccacattggaatgacaatatatgcagcaaaccgttcctttgctctgatcttatcagcaatcttcaacgcaatttccataggaatcaggttgttggcacctacatgaccacaacatagaataaacaaccttaaagaaatgaccaaggttgtcaagaccattgtcttaagttgagaaaaatactgagaatagtgctcaacattttaataccaaagaaactgaaatgtcaaaaccacaagcaaaagagttaccacagacgcagctaaatgcactggaaaagtgataaaaacaatgtctctgttctgtgtattaattcatgtatatatacacacattttgagaaaattatcgtaatcttgagtttttcctaatcatgagctcacttgaaaaaacaaagacaaacaaacctatgtccttgtgagcattccagtcgtaggaggatccaatgaaatactggttctcgatgtagatgaagtgttgagctgcacgaatggcctttacatatgcggtgtgtatgctcatgtcaatgagcacattcttaccgcacaccaaattctgtccaaacaaaatccctctatccatcaatttccaagccaaccaaatcataatgacagcacaaagtttctttgattttttcacctcaccttgcttgtagcatattttggatcctttggaaaacctttcacagagtttgaatcgattgaccggaaaatctgatttacaaaaccagacaattattagcttcagaaatttgggacaatatttgtggaccaaagtataaaatttgcatggttcaactgagagatgggcatctttccatggactttgtgaattaatcagaaccaaactttaatacaatggtgcgtacctgaacatgccaagcctcggggtcgtttgcactaacagtaggagcatccaaaactcttaatatatctggaatcctgtcgatccttagtagtgcatcatcatatgacgtcttcaatttattgattctgtgaggcttagcagccttcagccacctctcctcaaaatttgtcagcacatcatacgcagctgggccatcaatcttactgtgcaagtcatgccaaggttctcttggacaaccggacacgttacccttaattacattttagtaatccaagtcaaggctttcccattcagaacaaaagaaactagcaactaagaattacttaggtaatcaccaagaagaacttgagaagacagacaaagattgaagtaccacttaataaagttaaaagcagtatgtttttccactgccaaaggttattccttgctataaattccttaagtattcgacaccaaagttacactaatatatatttagaaaggcaagcagacataccgtgaaagtggggttgtgatagtcaccattatgatctgtttgcagtgtcctaaacaacggatgttgaggagtatcatatcggccatcacatagatcaagcccgcccacaaaagctacgattttccttctgttacccccagcatcggcatctactattaagtttttttggtggtgtgtatagatggttccaacttcctgatggactaaaatataaatagaagccggataccacaaccaaaaaaaagaccaaaaattcatgttctaccctctgtttgacccaactatgtcgctttccagcatttcgagggcatagcaagacttgcactgaggagtccttgaaaaaacggcgtgtctcctcgtcatgggttcccataaccccatcctgttcatgtgaacaaattgtgtcaatacctaaaacatacatgaataaccatatctaaactatgtcatctaagatacatatatctctatctagttgcaggtttctgcgtgaagcaaacatttctcatacttactagattcaaactgaagattaaacccaccaaaaaatttctggtctacaaggaaaagtaggctaacaaataaacggaaggaacctcaatacgacttgaagaagccaaagctgttgacttccgagactctaaaagatgttctggttcctaccctatatagcctagctaacatatgcacttcacaaccaataaagaagtagggacttgaggtttccagtaacttacggtcatgtatcccaagatgttttgtgaagttgggtcgtcccaaaccaaaagcaggactctcacaccttcttgggactttgatcttaggagctcacctagtctacattctgaagaaggatcttctttatcccgaacaagcctgacattatgccacactgaccagcctgtaatataaatcaaacgtctagcttgacaaatggcatgaaacatatcatgccaacactttccatgttcgtaacacattccatttccgagttttattcccgggagcatcccttcaggtacatgtgcatcttggtacaatgtgacacttccaccttccctaagaggaaaatatgttccaggcaccccctggtaatagggacctgcaccaactccgctgtgataaacactgagtttattcattgaagtatactgaatcgacaatgatagagttgcccctggtttacaaggctttccattgctgtctcgaatggagtaagtcccttcaattcttgcacctgagtaaatttgttcaacagggattgtaacaattcctataagctgtgaaccgacggcatcactgtccttaacaacaaaatggacctcggcagcgtgatgagctacagggacataaaaatgctgctgccagacaggattttcgctgttgctaatgacatatgttcttcctatgacagcaccagcgactgatatggacacgtaaggatcactagtgatcttcttgctcaactggccttcgatcatattggtcatgccaccaaacacaacacccaatgtcttatgaaacaaatctaagtttggtagattattagcacaagaaacccaaatatccaaattaccatgcaacaagaggaccttcaaggaggctttaccaaagggcacaatgtgcataccgggactatgcggcgatgcggtagatgtaaaaccatgaccagacgaatctagcctgcctgagtatgataaatctgaatgacttgaaaacgaagcatagtaactcactggagggtaaggaggaggaggttggtgttggtaatcaaaagaagcatagtaactcattggagggtggtggtggtctaatggacccgaatgagacattgatccatggtgatgaggcggtgctgggtaaggaggattaggccgcggaggcctgtaagggtaataagggtaattccaaccataattctccatcgtaactaactaacaccacaactgactaattcataaagaaattcaaacgtcttcaacgttttctccgatcaacatttcttcatcagaagcgaaatttcaaaaaagcaacaatggcggtttgcgaattgatcagaagagagagatatataagtacattcggatcacagcggagcttagttccaaggaattaggtgagacttaccttcgctgaaaatggaggaaccgttgtaaaattttgatcatcgcttcttcgcttgggggaagaaagagtctctcgattttgattttattggttttggttttggtcaacttaacttactattgccggtcacatatttccacttgtcaaccttttttttttttttttttaatatatatattattctctaaatataaataaaatatataacattatgacttttagttaaaaatgcatattaggtaaaatctctataaattaataattttaagattgataaaatttattaatttgaagagatattaatttataaagaaattttacaaattatgtaatttcttataatattcaatcaaaaaaggtattttttttcttttcttataatcaataatatttttgaaaccaattacaattattaaacaattatcaagtttaaaaaccaaaactaaatttttcgatttagtaaaaatattagaattaaattctacaaagaattaatacaaattgaatactatattcatattttagtatatatctatatatatatatatataaattagtgaatttataatattgatgggaccaaatatttacatatgattttcacaaaaagttattattttattaatttatcgatttgtatcaattcttacactggtttcaactcgggattgaatgaatttattaatttataaagtttattaatttattgaatattaatttatagatgttttacctaagacctgacggttttatgggcaacatacaaaaaaacaaaaaatccaagattattttgaaaggttttaaaatttagggccaattatcgttaaaatcaataaaattggggccattttgtaaataatttttgttaaagaatttgaaaaaaaaaaaatgggccacactaaatgtttcatattgcttggctacccctgcataagagttaagacaagtacgcggactaacaaagttcattttcttgttcaagtatgtactttactgttgtttatttttctgcagcttcacaatatcatagtgcaattctatagctttcttggttatacataacaatattgatattaaccattcaacttcttctacgtgaggaagatatctgttgaaaatcacactttcactctcaaactacctcttccaacattcttttgaggtcagcactctcactctcttgtcactctgttttgcttttgttttctttagagagaaacaagaacacgtttaagagcatgatgtcttgataataaaacttgggtgattctcttacaagatacaaacacacatacttattatagttttacttgaaacacttacacacacaagcatgctcttaaacgcataattaactctgatttcttgcaagctactctactacatattgggactctaacaacaagcatgctcataaacacaatttatgtttctttttatttcctcacctactttgcagtttcaagatgcagaatctcttaatttttttattatagacataataacttctgtgaaagattgtaactaaatgtatatgttttattttggttgcatttggtacttgagaaagaggaactagtgtcaccagaataactcaaactgcacgtaattatcataaacaataaatatacaatttacaaacatcatttcagaatccattttgtttaatgaggttgaacctatcaccatataagctatttagaactcttgttgaatatgtttgtgaatccattctattgtgtgtttctttgttttgtaataactctggtcatgagttttgagtagagagacattaaaaaaagaagcacatttacaaaatcctaaaagttcattacaaccatcgaccaaaaggtttgttagacaacttatcttaatcttgttatagctaattctcacacgagaatccaaaagactaaaaatccataaacgtagatagaaagataaaccctaagatagataacaaaagagggcattacatccttagattaaccctatacaatccctaagatagcttcttcttcttcttcttcttagttggtttgagcaagcaccgaagtcacatccttcaaaacatccatctccgccaacaacaactcacatttcttagcgtccacaaccttcatcttctcttgaatcttcttcttagtctccagagacaccttgctccacttcttcttcacagaatactcatccaaaccgagattcgcgataaccggaacaagaaaagactcctcaaaccactccgaatctgctccaagaatcacttgctcatcttctataaccaaaggtttctccaccttcttctccttgctattagccttacccttaacaagaatagattcatctttcttcacaggagattcaacgttcataccatcagatccccaaatcaaaacagccaaacccaaacatttcttatcatgattcgattcaccacttttgttcttccggttaacaaaatacttattctttaatcttctaatcttgtcaaagaactggacatgactaacatcaaagcttatagatttcttggcgatatcaaaaaacgcattcttatgatcccaaggacttgtacctgtctcagctttgaaatcaatcactgcctgtagaagagagatctcatcttcttcactccatactctctgaggattcgcctttttgttatcgtcctctttcttaactcttttgacatgcatgtcccttgaggtgcttccttcaccagctcgcttcttccctgacttcaccgccggtgattcagcagcaccttctttcttcttccgcctggttaagacgaatgactgcttctctgagtcatcagaagaatctgtcttagaattcacagcggcggaaggagattttagggttttagaggaaggaactgtgacaggatctttgggtttgctttcttcagaagaagacttaaagatctcttcagaagaactctcaacttcgcttgaagaagcggttgctggactttccaaaggagccattggattttcttctttcagattctcgggtatgagtaccaagtgggaactgaagggacaattttagggtttgtgagttgcgagactttttatttttttacactgtaacatctcttatatttaagaaacaattaaagtaaataaagctcaacaacaaaaactaattaagcccaacaaaataaataaaccatcatccttatatgtaacactgtaacatgggaaaaaaaaacaattttttgcccaaatgtataagaaatttgtataacaaaattcatactagattttcttgttgtaattcttggtatacaaaatgaaaggtttctttgttgtaaaacaaaaatatatgtactaaaagtaattttacaaagtcgctttatatttttacatttagaaagatcatttgatcaagtgggaaacctttattgaaattaacaaagtggaaaagattgtaagtagtgaaatttagtgtcatctatagacaaaaaaaatgtaaattagaatttaggaatatgaattcggttaggattagtcgattaggtttattgagtaaactcaataaaaattactgtagtaatacttcagtactcggttcggtttatagttaccgaactgaaaccaaacgattattctaatttaattgaagttaccaatttttatcttaagtttaattaaaattattgaaaaatatgaactctctcttacagtaaaccgacctgaaattggtttttggttccaatttgacaccaatattttatcttgaaccaaatcgaaatttatgctattaaaattgaaccgagccgaactttactttcggtctacttcggttcaagaaatttcaatccaatacatatgaattctgaaagtcctgaaccgaaccagagtgtttaaccacaataaaagtctcttcaatggtctcttcttgagtatatcaatggtctctcatagtttcaacaacaccaataaactgtcatcttcaagttggagtttattacactcgttccttcaagaaactgtaccgtcgactttcagatttagccatttaggacttctcaagattttgaaaatggcgcatcaacatttcttcaagcctcttcttcctggcttccacgcctccttggtactctctttctcgctctttcccttcttctatctctgtctatgtctctctgagaagctaaagatgagtctggttttgtatttgcatgttgcttcagacaattcctgtagccttcttcttgaagtatatagaaggaagatatgagcagaagacggcgaagctgagatcagacgcgtcaaagagaacttgggaagtgaagatagatggccagagactcaccgacggttggaaagagtttgctgtctcacatgatcttcgaatcggtgacattgttgttttcagacaagagagtgacttggctttccatgtaacactgttgggacctagttgttgtgggattcaatatggttcgtgttcagtcgaaaagaacaacctcggtgacggtgagttgtgttctgtctctggctcttcaagaaacgtggtttgcttttggaatgtggatcagtgagtagagataaccagtttgactatataacacttatttttcagagaaaaagaaagtgaaggagaatccaaatggagaagcagagtcttcttcacgagatccctcttgttttgtggctaatgttgcgccttcgagtctacgttatgacttgatggtatttgactcttaagaacccgaaaagaaactctcattctagggtctgaactcatgttgtattctaatgaatttttcagagatttccaaggggttttgtgagggataatggtgtagtcggatctggagagattgttctgatgaatgaaaagggcagatcatggaattttaacttgagacaaaagccatcaaacggaacagtttatgttagaggagggtgggtgagtttttgtgatgccaatgggcttaaagctggagataactacactttcaaactgatcaaaagagcaggaactcttgttctacgtttgttacccaatgagccaaaagaggaagctaatgaagtgtctcttcccgaagaaccggaaagcgatgcagagcgcaaccttggtgagttctgttctttctttctctaactctgcccatgatacttgacattcaagaaacgtgctcatatggattttatttctttctttttttcagaaaagattcaaaggaaggagaaagtgaagaagaatgtaacaagagaggcagagtcttcttcacaagatccctcttgttttgtggctaatgtctccccttcgagtctacgctatgacacactggtattctactcttacttttgaatcccaaaagaaactctcattctagtgtctgaaacttatgttgtattgttccagtatcttccaaagcgttttatgagggaaaatggtgtagacaaaagatgtggagagatgattctgattaatgaaaagggaaaatcatggactttagatttgaaagtaaagaaatcatccggaacttctctcatcaaacgaggatggagaagtttctgtagtgccaatggactaagagctggaagtatcataactctcaaactgataaagaaaagagcaactcttgttctacgtttgatccccaacgagccagaagaagctaatgaagtagtctctctttcgacagagcaagaaagcgatgaagagagtatccacgacgagaaaatctcaagaagaaagtctttactatccgaaaaccgatttgtgacattaactctaacaccttatacaatccaaagttctctactggtacgtttcatcattccaagccattgtcttttaacagtctatagaatgagaatcttttgtgtgaatctatgtttcagcgtcttccggttcctttcacgaggatgaatggtatcaatgaagaaactaaaatgactctgttggataaacatggtgtgaagtggttaacgactctgcggttcgaggacgacaaaagaaaaagactacgaatggtaggaggatggcaaggattcatccaagctaacgatgtgaaggcaaacgaatccatcatgttggaactgatttgggaagaagaaacaagttgcgtccttaagttctgctccaaggtgaagctagaaatcaaatgaaactctatattgaaatgaatcaatgtttgactcttttatttggtaagatataactcttaaggtttcattgtcttagagagtaagaacaaaaaccatttttcttttaatcttctacattgttaatatcttggataatattacaagacacacacacactcttacttatactacttcactacactcttaggcacacacacaagcatgccttaaagcacattattaaccctagactctagactcttgcacaagccactctactacattggctcttgtggatacttgagtaaaaagtggaatatcttacaaacacttgcccaagtagaagaaagacaggatccaaagataaatacactgaacagactagagcttatgacttactaagaacctaaacaacaccaaatgctacaagggcatattggtttcatctaactatcattagctgcctctgcaagcttggcggaaaatctaagcttcttgatattgaatcttgtttcctcaacacataacgctttccattcatcactcaactctcttcttttaccatttccaaggttcatcagcttctcaagctgcaacttcttttgataaccacttaaaccttgcgacatcaccgcctcaaatgcatcctgcaccgcgcataactcatcatcatcatcattgtcctcatcatgtctctcttttccactactagtcccattctctgttgttttggctgccccattctcatttaaaagttcagtattagccacttcctcctcgtgctccttcaacatctcctccccgctctcgttagtccggttttccgctgcaccatttccgtttacctcgtgctccttatccataccatcatcatcaccttgtccccaaatcatcgaagaaaacccaaaggcttcagaatcactagacctagtaaatttgggatcattcccttgattgattttctccgagtgaacatgaaacctccttttcaacttcctgattttactcaaaacctgatccttggagaatctctcaacgatagaacttccgaggaaactacaaaacgcatcccaatcaattttgggattgaatcctgtcttagctctgtaatcaactaacccctgagcaatttcgaaaatctggttttagaaaatcacaatgcaaaaccaaatcaaactataaatggagaagatcaatacaatacctttaagatagagagctcatcttcctcgttccagatccggacgatcaacggcggatccaatttcttcttcttcttcttcatcttcatcttcttcttcatagtctcttcttctgcgacggaagcagcacgctttgaggaaggaatattccgtggagatcttcgatgggagagggtaccgttggagttatcagcaccaacacaggaagagaaatcgatctgcttcggagtcaccatgcttattgcttgctttagacttgctgattctagggcgcatgcagagcagtgattcccaatcttcacgacctttaaaaagtgaaacccgagagaaaaagaaaagcaaaataggatgagtaacacttggccatacttttctcaacattcataacaaaacaaacactttcatctttttttctactgtttaatattcatcaatagtacaattttgctcttgcaaaaatctatcattttagtcacttaatagtataaaatattttatctaccttttttatataataaattaaaatttagttttttctacattttaagattcattgctgatatattttaagtaaataattatattatatattatccatttctgattgaatatttttttattattaaatagatattaaaaggtatttgaacaaaacatattacacgataaattaataaattttgtcggtctcaaatcggggtaatgtaaaaattaaccaaaatcgataagataataagataatattttttttgaaatccctatgtaaaaatatggtaccagtaatatcataaaattaataatcataaatctttagcatacattcaaagactaattttatatgaaacttttgttcaagtcataattgcaactctttctagagtatagttggtgtgatctcttttgtattcacataactctttgcgtatttgatccgtcatatttggttttgtaactttttttatatgaaaaatcattgttaagatttgtgtaataaaaaattggattaagtctcacgttaacgtcgtatacatgcacaatatcttacagagaaaaaataaaaaaagtaataaaaaaaaatctaacagaatatacaaacaataaaacataaagaaaaactaaattaaaatttttctttttaaaaaattaatattgtattttacgtataaatttttataaattaataaatgtactactatcatagtaacacctacaaactgatatgcatatatacacaaatgagagttaacactatatatatatcgattgtaccttgtgtagtggaacactttattgttgtaaatacataatcctcaactattagtgtctatgtatgtcaaacaaatgaaacaatgaaagcaatccaaattaaatgaacagattacaatgtaaaatgccttcatccatctccgccattagcatgataggaacttgtactcgatttcgagatccaaggaatattacaaaaggaacgtaaccgtgcttctttatgatcttcaccacctcaagaaggacctcttgttatattgtatagctcctcttttccctgagacaaatgaccacaattctaatgtaaaaagatcacatcaagcgacacaatactccatcggtcaaagatcattcttttagccaaaacttcattgattaaggctttgaatgggagggaagcagaaaaaatacatgtttacctttgcatatagtgctcctattatcaagacattatttctgtattttcctttttgttttaatatttagagttaagatttctgttatttaaaaacagttgatctatgcatgcagtccttctcttaccaagacatcattcatgtatttttatttttgttttaacataacatttttgttatttaaaatcagttgacatgtgcatgtagtgcttatgttaccaatacatcatttatgtatttttatttcatattttattatttaaaatcagtgtatctttctatgtattcctcctattaccaagacactattcatgtattatcatttttattttaatatttattttaagattttgttatttaaaatcagttgacatgtttatgtagtgttcctgttaccaagacaccatttatgtattttattttttatttaatatttataactaagatttatgttatttaaacaacagttgacttgtgcatgaagtactcctattaccaaaatattattcatgtattttcattttttatttaatatctatatttaaaaattttgttattttaaaattagttgatatatgtgcatatagtgctcctgttaccaaaatataatttttgtatttttttttgttttaagagattaaagatttttgttatttaaaatcagttgacttgcctatgtagtgctcttgataccaagtcaccattcatgtattttattttttattttaatatttataattaagatttatgtttttaaaacaatagttgactcgtgcatgtagtcctcttattaccaaaacaacattcatgtattttcatttaatatataattaagatttatgttagttaaacaatagttgactcatgcatgtagtcctcttattaccaaaacatcattcatgtatttttattttttatttaatatctatatttaaaatttttgttatttaaaatcagttgatatatgtgcatatagtggtccatttaccaaaatatcatttttgtatttttttgttttaagatttatatttaaaatttttgttatttaaaatcagttgacttgcctatgtagtgctcctgataccaagacaccattcatgtatttattttttattttaatatttataattaagatttatgttatttaaacaatagttgactcgtgcatgtagtcctcttattaccaaaacaacattcatgtattttcatttaatatctatatttaagatttatgttatttaaacaacagttgactcgtgcatgtagtcctcctattaccaaaacatcatttatgtattttcatttttcatttaatatctatagttaagatttatgttaattaaacaacagttgactcatgcatgtaatcctcctattaccaaaacatcattcatttatttttattttttatttaatatctatatttaaaattttggttatttaaaatcagttgatatatgtgcatataatgctcatgttatcaaaatatcatttttgtattttttttttgttttaagatttatatttaagatttttgttatttaaaatcagttgagttgtctctgtagtgctcctaataccaagacaccattcatgtatttattttttcttttaatatttataattaagatttatgttaaagaacggttgactcgtgcatgtagtcttctacttgacattcacacctgaaacattcaaactctaaatacttatagaagaggaccataaccattttgttgatacaacattgcatcaatttaatctccatccttcagctccaattgacaaaacacattgaaaaaaacaccatcgatgaatatggcttatcttaatatattataaaaatctttaagcttgaatgataatacatatacctcatcaggtgtatgatattctcgaattcaaaatagaaagcgaaatgtgttccactctacacctctcattttggtgtaaagtcccatcaatttaagaagcttcgcctttcttctcacctttatattaagtcatgcatgctaatgtagatgaagcttgtggacgctaagaaatgtgagttgttgttggagaagatggatgttttgaaggaggtgacttcggtgcttgctcaaaccaactaagaagaagaagaggaagctattggattgtattataggtttatcggtttttaatctcgggtttaaatggagatgtaatgccttcttttgttatctaacttaggattcgtctctctgtctacgttaatgaacttttaggactttggattctcgtgtgagaattagctaagttgtctttggtcgatggttgtaatgaattagctaagttgtttaacaagccttttggtcgatgactgtaatgaacttttaggactttgtaaatgtgcttcctttttgaatgtctctctactcaaaactcataaccagagttattacaaaacgaagaaacacacaatagaatggattcgcaaacatattcagcaatgacaagagttctaaatagcttatatggtgataggttcaacctcattaacaaaacgggttatgatcaaatactcgaagccttttccctgcggaggctgcacattgtaacagtttctgttgccttgagggaagctcctaaagttttgaaactgtttctcaagagaacttagtttgaaacaatgccttttccaaaccagtttcaatggtgttggaaagaaaaatttgtatgtactcaacaagaaatgatccatttcattgatacgttttcatcggttgcagagatggtacgagtgaagatacttcccggccttcttccaaatcttccttatgacttacccactcactcacatcacgtccaataaagagtttcaagttttgtattaataaaaagggaataaactaaacagcaaaagttgagctgaactaattgatcatgcactgcaaaccacatcaaacgagccattttctgcttaacatattgaattgatcttttcctgtacataggaattgttagaaccctataaatacctacctgttaaacagaaactagaaggaaagaaataaaagcaaggccaatatgaaacatttttctcttgaaacctaacaagtcatcacgattttctgtaatttcccaaaaacacagatttctggatccatctagctaagtagcttccggatcagtattccttgtctctacaaaatgatcactcacaatgtagaattgtcccaggtggtacctaacgacacaccgtgcttctttatgatcttcaccgcctcaagaaggacctcttgttgtgtattgtatagctcttcttttccctgagacaaatgaccaccattctaatgtaaaaagatcacatcaagctactaaactttgtctacatttgacgacaaagatccctagcagtagtagtggtagttgtatcattcaaaaaatgagaagactgttacagagactaaagagagagtgtaccatgcgtatcagattgcacccaatggtaagttcagcgaaagatttttccactcgcgataagtaacagtgtggagcttcttttcctaagaaaacttttgtgttggacctcaacatttccttgatttcatttgatatttgaggaatcatatccaagtcatcgatctgcagtgggatcttggatgctattgctcgccactgagcacgtgacttattcacaatcacctatatatgttattatacttcagggtcagattcaaacaaatgagataattaaatcattgcgagtgttaactcagtgtggcattatgaaagctagagcattagcttctgcaatatgaagatgaatagtgagaaacagataaactaacctgactcgaaaacagtgaattgggtaccaaaaccggaaatttttctgcattcaacaaagatgttgtcgtaagtcccatttcaataacttgaccttctacggatccagcctgcaaagtggggacaaggaagacactatatcttgagaaaaatatgagtgagaactgccaatatatttgcttgctctatgaaactaaataaaagaagagagcagaaaagaaaaaaaggttcaactaactttgatagtatcacccatagagaaaggccgcgagaattgcattgacagaccactcagcacattaccaaggatatctctggcagcaaatgcggtggctacccctgaaaacgcaaatcaaaattggtatgttatgagcaaatactatagaatcagtaggatatctaaaaatgttagcaacccctgaaaaagataagactatatgcttgtgatggcctctagaggcctttattttctgttgaatcctagcaattagcattataggctgagcaaaacgactaatatgaaatggagaacattagacagacctccaactccaccaactgtcaagatagattgaacagctacaccacatgcttcagcagaagccatcaaaccgatagcgaaaagaccaacagatgatactttgtctaaagtcaataccttctccctatcaagcccaccaaaactcttagccgacaacattcgggtaatcacattggtcttccaccgatataggaaccacacaagtgagagaataaccgctcccttcacagtcggggaaaagtattgagctgctatagttgttggcgccaccattgcagcactgcagcatatcacattcatcaagtctatctattttctacaacatacatgtcaaaggaataaagctagagagactcacatttgtgcaaaagcaatgaaggtcaccaagtaacgagcaggatcctctaaagctccccaaaagcttttctcataaggaacatcttcgttagagaagccaacgggaagcagtttagcggaactttgcatagcataagtgtgaaaccttctaagaatcctaggcatcacaacccaagcaaataaagtaccagtcatagtgagactaacaggaactataacatctttaagataagggttagagtcaaggaactgctgaacatgagggatcatctcatcagagacatctttagtcttctttgcagtctcagtaacagcatcgacactagtctgcaacacatctttagctttctcaacccaatcattcccattcccattcccatcaccagagccagtaacaccagaggctacaatacttccgaaatcatcagatttggagctgaaagctcgtgcgtacgaagaatggcctaagtaattgaaaggcttagcatcattatgcaggcgtatgttcgatgaaaaggagatcatcgaaggagaagcttttggtccatcaagaaggtttccgcaagtaaaggccctggcatgagagtttaggagaccagaacacgattttgcagtggcatgaggttttattgatctttgaattgacttgagaagcgataacctaactccggccattgatctacaaatcaaaatcaaaaatcaggatttagaagtcttaatcacattcttaaccaattgaagaagaacacagtgttcactaattaagagcttgctagagtttcgataatggcggaccagatcaaaaattgaagtcaatggaatgtgaagagatcatagaacttgtatattacctggagagacttgaaggtagctagattcttagccaaaattctcgctgagagataaagaaagaattctaaattttgcttggcaaagagggaaagaagatgaagaagaagaagagacaggtttatttcgtcaactctgcttcttattcggtaacatcgacgtcgttttagtcaccttcaacttctgggccttttgggcctaatgattcaaatttgttgggcttaatgcaagtttgattaatttggtgcaaaaccttattaagaaacacacacacacaaagttgtgaatttgtgaatttacttaactacgtacatatatataatcattaattaatcacggtgtttgtcaaatatatatggttacaaattcaatatgttttggacaaaataatatgtgcctaaatctgcttataaatgacaaaatatatacaaccactaaaaatagaagagatatttatcatgaattgtactccaataaaaaaggtattgactttagacaaagtatcatcctaagatggagtattttgcaaatacttggctacaataaaaaaaactgatagatttgtgtgaaaaacgctattttcagttattaattactgtaatcattaatgttgaaatgtcgttttccatcttatggttttattcttgtggagaattaatgttccaaaaacagctttgactctaataaattgggaaatataaaaaggagatttctttctaaatccaaaattttttttaactaaataagattattttagacatcatcaaaatatatcttgtcttaaatttgagttaagttgtcttaattaaatttctcggagtagtgtaataattttcatatgtaaattaacaattgacagcatcgagacaaaccttgcctttttggcattagataatacagattataattgtaattaaaaaaaaataaacttggtttcatttcttaataaaaagccttcaatctcaccaacaccaccactgtcacaactcacaaagcaaaaaaaaaactagtcttcttctatgtcaatcagagccatgggagatcaaaaaacactttcttacgacaaatctaataaacccttttattcttcttcttcatctccatgttccttcacagccatcgtcgtcttcttgatcttcgtctcatatctcttatactcattcagtttcatctcttttctaaacccatattcaccttctaaatcccccaattctctcctcgtacccgttatccgtctcgggtcgggtcaaacacctgaggaacaaacggagctcaaacacatagtcttcggaatcgccgcgtcttcagatctatggaagcatcgtagagaatacgtgaaaacatggtggaaacctaacggagtcatgaacggcgccgtttggctcgacaaacccatcaacgacaccgtttcttcttcatcagctttgcctcagatcagaatctcttccgacacgtcgagtttcaagtaccgttaccgtaacggtcacagatcagcgatcaggatcacgagaatcgtgtccgagacggtgaggatgttaaacggaacggaagcggagagaaacgtgaggtgggttgtgatgggtgacgacgataccgtgtttttcacggaaaatcttgttagggttttgagaaagtacgatcataaacagttttattacatcggagctccgtccgagagtcatttgcagaatcttcatcagttttcttatggaatggcgtacggtggaggagggtttgctataagttatccattagccaaggttttggagaagatgcaagatcggtgtatcgagagatactccgatttgtacggatccgatgatcggattcatgcttgtatggctgagcttggtgttcctctcactaaagaagttggattccatcaggttagttttgttattaccgagaaaaatcagccggaaaaacacaaagtaaatgtgaaatagtaaaacttaaaatccgtgattagattcatttgtcattgactcttgttacttcacttactgattattaattttatggtatggtttataacagtttgatgtatacgggaatctcttagggctattatctgtccatccacaagcaccaatagtatcaatccatcacctagacgtagtggatcctatattcccaaaaacaaaccgagtcaacgcattaaagaagctaatgatcccagcgaaactcgattcagcgagtcttgtccaacaatcggtatgctatgataagagtcatcagtggacaatgtcaatctcgtggggatacacagttcaaatcacgcgtacgtatatgccagcaaggatgatggaagtgcctactcgcacttttaatgattggcacttacgtagcgatttcactaatcttgcattcaacacacgtccggtaacatggacggattgtcagcgtcctcgtgtgttttatttctctcatgcgtttagtaactcttcttcttctgatacaacgacgattagccaatacttgaggcacgacgaatggtatcctaaatgtgaatggggaatcgcggatccttccgagatcaatcagatatttgtctacaaaaagcctactccggataggtggagcaaggtacataatttttgctgttaatttactattcagaactctttagtcttctattattgttcacgagaaattgtcaaatgtttttgtaggctccacggagagattgttgtaaattagtgccaacaacgaccaaggggacaatggtgatcaatgtggcagcttgtgcaaatgacgaaattgttgcttattctgataaatagtttgcttcttgttaacttcacaaagaggacttgctttttgaaaagaaaatcttaatgggccgaacatttgtttatttaatgtagtgacatttatatagttagggaataacatacaaaggcggataatctaacacgaagagttcgtacctacccgcatcctatcacgtgtatcaacaatttttctcagcattggcttatttgagtcaaaatgtagcatagatgtcgaagaaaaagaaaaaaaaggtttgggccttaaagacaagtttgaatgtatgggcttcggcccattaagacaagaaaaagacaattaagacggaacagctgtaatgacgcgttgacttggtctctctctcaacatgtcaattttcattacattttcttgtctgatcaaattcgacgactgcaaaaatttgtgctaatctttccacgacaatggcgatcctctacacaagaatcgtattccttctcttcgtcttccttgtatcttcttctgcatttgcctctttctctcctgtcgacgagtacctcgtcaactgcggctccgacgttgactccaccgtcgataaccgccgcttcgtcggcgacgcatcgtcatcaaacgtccaattcttctcctctgaaggatcaatcgctctcaaaggagaaaatctacctcagaacgttccccaaatctacagaaccgctaggatattcgcacaacaagcgaaatacaagttcaatgtcaacgagaaagggactcatatggtacgtctccatttcaatcgtctctattcctctagaatcgatctcaatgacgctctatttcacgttaccgttaacggtcacgtcgtcctaaggaattttagcggcgactcgtcatctgattttgaatctagggttagagaattcttgatttgggttgatgttggagaggttgttattaggtttgttcctagtaaagattcgaactttgcattcgttaatgctattgaagttatctctgcgcctaaggatttgattggtgacgttgcaacctctgtatctcatgatgggactgagaaattcaatggtttagctaaacaagcaatggaggttgtgtatagagtcaatgttggtggtagaaaagttactccttttaatgacacattgtggaggacttgggttactgatgaaggattcttgaaaaccggtgatgggtcgtctgagaaaagttacttcaccgggaggattaagtataggcgtggaggggcgagtcgtgaagttggtcctgataatgtttacaacactgctcgtgttggtaaaagaagcaatggattggttgatatgagttggggtttcaaggtgaatgtgggttacaagtatctcatccggatgcatttctgtgacatagctagcaaatctctcggcaggctttatttcaatgtctacattaacgggaacttggcgtatgaagatttcgatatctcatacgctgcggataatgtccttgcttctccgtattacattgatttcgtggtggatgctactgctgatgacaacaacccttcaggatcgtcgataaccgttagtgttggaccatcaaacaagactagtgttgatggaaatggagtggatgcgatattgaacggtgttgagatcatgaagatgaataactcgatgggtagtcttgatgggtatgtttcaacagagatgattctgagtacttgcccaaataggagaaacctgagcatatttatcgcaatgttggcgtttatgtgtatatttatgagcttctacattgtgactcaaagaaagagagttaaggatcagtatggctggacaaagctgtccatggacgtgcttgaagataattccaagtcagggaatcaatttacagcaagaaaggcttgaagatgcttttgtttgttgaatatacgtattaacagtggacttccttcttgagtatttactacttttgatgatacaatggaattttcataagggtgtcaatgtgttgtttatatatatatgtgtatctatctggcgtatttttattcaatgacaaatggagagactcaatatgtaattttcggagtgaaatgttttcttcatgttcattgttcatgttattattgatgtctctttgtttgatattttataactttataaaaaaagtaatgaatacttgatcaaacaaatctatacaaggtcaaaagtcgcggtgatgtcatgtcctgtcctgatgatgagcaaagccagaatggtacggtaaccgtaccgcatgatcctcacctccgaatctatcaacaagtcattacatcataaatctaatatatggaggccattagattttcttttctttttcaccaaaacatgaaatcagaaactagatacagtttatatattctcaaataagcaataagtggagcattggattacgaaattctgaaatgaatgatttgttatcgatctccattatgttcttgagtcttgatatatatatatatatatatatattttactttttttttttctgtagtcttgactccattgctttaattggttaaataataaaatgtttgcgtacacactatacactatatgactatacacaaccaaacaaaggtaatacgtatacgaccatttcatgcaagaaaaagccttggtttcatattcataaatcataatacaatataattaattaattggaccttttatttttatactttattcaaagttagtctaatacttttacgccacatatattctaaatcttgagtaattaaaatgaatgaatatagcaatgatctacatgtgatttagctatctctatattaaattgaatataatgtgaattttttttttgtctattggtagcctaatctggaatataagatttccaaataaaatctcagaaaataaagctctataaatttacaagtcaattagctatctctattttaataattgaatatcatatgcttttgcttcaaaggcatgtttttcaacaatgtgaacatctcttttcaccttttctttatttcattgtccttgtccgtcaccaaccaatcatacacttttttcccattgacatgttcttctatgattggtttctttccatcacagtcagtatctttatctctttgacgtacgtttcaatcttcttctctaaatcccgccctcgcgttccacgctaacacctaattctaatatatacaaatcatataaatagccatttttatatcctctcgtaacttttccttctttctttctccaaatttgatcgtaaaaaagattcctatcttcttcaccattcttttcttgaaaaagaatcatgggcttatcttatagcggcgccggagttattatcgccggagttatcttgaatgattttatcaaatcagttcgttcttttcttgatattcgtcgtttgtttggttcggcatcttcagggagcactatcatcgacaagattccgatggacgatatgcttccggcaacaaagttcgaggatatatcatcaagggttaatccgccggagagctgccggatatgccaagatgagttcgacggcggtgacgaagtccggtgtttgaggaattgcgtacatgtttatcacaagacgtgtattgaccgttggatccaagacgataagatgacgtgtcctttgtgtaggaccccgatcgttcctgatttctatttttttcgtttgtaaattagaaaagctaaatgtttcattaatcagattttttttcagcaaatagatatcaatcgttcactaataaaaactaattttttgtctagtttatttatttagttacttcccataattcatttccgtttaaaaattatggttatcatagtcctggacgttcggttatccattcgatttcggttatattcattcagttatcggtttgttgttctaaaggtattcattcagtttggtttcgattctttcggttttcagatatttttttgattattttcaagtatttttattattttatatatattctcaagtatttttaattatttactttagaaataactaatacttttaaaattttgattgatgtttcggatattttcggtttgtatcaattcggtttcggttatttcagttatagaatttagtatgcattcgattagtttccaattttcggttcggtacggttcattatttttgcttcgatttcagtttgatatattcggttcagaatatttgttcagacttagttgataattgagaactctttctcgaaacgtttaaatattaaaagatcacaaaatgggataaacaactacaagaaaattttgccttaatcgacgtcacatgtaaacaaaagaactaaatcggattcaatgttgggcctttcttgaagcccacatgctatttgggtcaaaagcgccaagacccaagacatatctcttaaaatctttgaactttttgagttttgatcacataagaatttacgataagatttactcaccacgagaacacacacgtggcagtttcactgattaaataacacatttggtgtattcactaatatcaaataaatgacgtcatttcacgcttctaatttatttcctaatgtacatttagtgataaaaccctacatacgtgttagagatacggccccgtgcacctactcaaaatagtaaagtcaaagaacgaccgtcagattctatgtctccctcctcagcttataatcaaatcgtggccgttgattctcttttgactcagaacgagcattaacggtgacctttttatccgacttcaccaccatcgttgccgccgcattcgatcgatcactaatcacaattctccagctcaagtgggacattcgtgttcgccactctctcgcctgtcacgcgtgtctctcacgctccacattttttttaatccccttaatcacacgatcttaaggtgtctgatttcactaaaaacatcggaggcaaaaaatgaaaaatcccatgtgcatgctcagtcaaactcacccctcacgtgacacattgcctctatcacgtgatagacgagtaccatttctagatacaactaagattcatatagatcctttaggatttatttttttacagtgttgtatgtttaaattgaacacatttatgccgttgacaaaatttaaaagtaaatatgaggttgacttttgatttataacagattcgtagtatagaatatttacaattgattgaccaacaaaaatgagcaaagatgttaccgtgggtcgattctttacctgggaacttaaatttggtaaaaattagcggcagcttttcttttttaattatgcctactactacatcagaggggtattatagggaactagagtaaaacctaaggacatttccgaccaatgaaaaaaacatggaaaatataagaagggctgagaaaagcaaacaaaaaaaaagttttaataaaccagagaaaaaaaagaaccctcctatcgagttctgtgagatctgcttcaaaagaaaaaaaaactggtggagaagaagaggtgaatcgagttataagcttacgtggtgatgtaaaatatttatatattgagcattttatacatcttcttcttacttgtgtttggtttcttttgggccaaagtattgttttgggtaaaaaatgaggattcggaagaacacgaaactgtcatcggttcttttatcgacagcaggttgcggcggagagagaccggacacgtatgtgtgtcacttaaaccagtctccatgggatgtgattcctgtttcttcctccggcgattgcgagttaactaacctagtcgactcgtcgtggttcctccctttatcgtcttcgtcttcttcttcttctccgcctctcattcacaaggtaattcaattcatttcattatgtgattacatttcgatttcgcttccatgattattgcccagcattatcctccgcctcttattagggtttgcttctttatttttttttggttggtgctcgggggagctttaaagaaccctaaaattatggattttgagatcctgggtcgtttaatctatcgattagggttaatgggtcgtcattattttgctctgttgattcccatttcgttctctatctccgattattctttcttgttatcacaaagcttctttgttaactcagttcattggagaagaagatagcttcaatgggaatgtgagtttgggagattgtaatgacactgctcaaaggtaattatccatttggttcttcactccactttcgactattgtctgcttccttcgttagtttcggtgtttttttctagggttttactcgtatttttgataatcgggtaatttaatttcgcccgaatccaaatgccgggcgacccggttataatttttcaattatcttattttcgattatcgtctaggtttaatagctccgtgagtagtaatcaaagtctagtctccgtagagaagcttaatctcaatgcggcggaggaggataagtacgctatatcgccggaagttgaagacccaatggatcagagcgatgactatgacaagaaatccgaagctcttgagcctaattcgccggtcaaaacttccggtgatgatgaaaaagtggttgtaacaattccgacggcgcctaaacgtggacggccacgtggttcgggaaagaaagtttccgctccggcattgaagaatccgtacgagttttactattactctggtttcgggccacggtgggggagaaaaagaggcggctccgacgacgagaagatggttataaacgatagtaaaaagagtagaagtagcgctagtagcagtagtgacgaagacggtcataaaacggcggcgtttggaggtgggagtgtgagtttcgacgagtttgattttgtggatgaggattatgacgtaatggaacaagatcaaggaagtgatcatgggaggaagaaaaagaatgagaagatgataatgatgaagaagacgatgaagaaaggaaggaagcccgtaaaggaaaggtctttgaaatccctcatgtgaaatattttatggcttttaagggtatttccgtctttttctacttgttgttattgtctggttttgttggtacgggggtttggtctgtttgtttagtttgggaacatttgtaggaagattttctacatctctgttgtatttgttagatgactgttttagttgttctttaaattgtttttttcatagactctgatgttgtctacacagatttaaagagtcttgaacaattttcaaatcaccatcggttaaacctaattgtatacatgtttcgaatcctatcctaaattgttaagttaaaagtaaatatgagggtcttttaagagtttaacaaaagatatagctttacatagaacaatttaaaatatagaaggttttaggagcgtctcaattttcaaatttaaatttatatcgattaattgaacatgtacattatatgattacaatctatcaaatgtataaaaatattacaaaagataataccttttaattttatttcagagatacaaataaaatgatataagagtacactgttttgcggagtatcataatctgaattaattttaataattcaaaatatcttttaatatatatatttatcattatataaaaaatctcaaaaaatattttctgatttaatattactaatacatgataacaagtaacaacatgcatcatattagaaaaataatatactcgcaaaaactttaaacctaaatttttttgtcctaaagaaacacttttatccctcaattttgtttatatgatgatgttggagcttgtggatctcctaatctctcagagatttgctctgattttgtgcgaagtttgttttttatatgatgatgatgttggttgtcggattaattcctccacaaaaacacttaacattcccaatttctcttttcttcatctttattttctccgattaatttttctgtaattttggggattttgtgaggttcattttgtgtttgaattgatttgatctattttaattttgaatatgtatggcaaatctatttttttttttaatttcaatctgaaaccagagaagaaattatcttaagtagagtacgagttataggtttccataagattgtgatttattcgttttcaccaaccactaaaagaaagagacaaaaaacacgttgcattagttttgttggcgtctttagcattttcaatgtagtctatattatacattggttcagcttgaaaatttgcaaccttgataattaatattgggattccctataattactggttcgcatatctcactcgacaactcgtatttaacataattatagcaacaaatcaccacaaaatatactgaatttagaagattttccataaaattcaataacatctatacattttttttgccgatcaatgcaggtttacaaacttcagttaattatgttagttaacatttttaagttttaacaattttctatattaagatctttatgaaaaggaaaaagaaaaaatgaaaataaaaatatgtataactcaatcattataatatagagaatagagaaattaatgtcattgttagtctcattatgttagcttccaaataaattaagaaaaaaatccttaattctaaaataaaataaataattagaattaaaaaaaaaatcaaatataagaagaagttttctaaaaaattaacaaaaagttagtaataaacaaccgagagcgagttttcattcattaactcgctcttggttgcttattcaagatttatttgaatggatggtacgaatgtaacatgtgcagtaaatattagatttaatgtcttagtgagcattttgcaataaaaatctgtggatttcatgtttattacaaacagtttcttataaaacatttccttcattattcattaagaaaattaattaagagcacaaacatttccttgttcgtttgccctagacaaggcaataaatcatatcctagagaagcgtaatcgatcattcgattttctttacctaagcgtacaattgaatgttttcttatattatttcttccgttcctttgtcttattattccttaagtctatgttcttacttacgttcactctttttttcttggttactcggacagattccaagtttcttattctacaagataaatgaatcttggttaaaatcaaacgtggaggttgtgaagaaatggacaagacaagtcagttgcctgatgaattgctggtgaaggtattatcatttcttccaacaaaagatgctgtaagaacgagtcttttatcgatgcgatggaagtctctttggatgtggctgccgaaactggagtacgattttaggcattattcagtttcggaaggccaagggttagctagatttattactttgagtctactaggacataaagctccggccattgaaagcttgagtctcaagcttaggtatggagcaattggatcaattaaacctgaagatatctatctctgggtttcacttgcagttcatgatagcaacgtccgtgagttaagtctcaagctttgtacttttgcggagcgtccaactaaattgcccaaaagcttatataaatgcaaatcgattgtgatcttgaaactgaaagacgagattctcgttgatgttcctcgtaaggtatgtctcccctccttgaaaacattgttccttggacgtgtgacttactcggatgaagattctcttcaccgacttctctccaactgccctgttcttgaggatctagttgtggaacgagatagaattgacaatttggggaaattgagtgtggttgtcaagtccttgcagagactaaccctaaagatgtcttgtccttgtcatcttgatgggattatgatgaatactccttctttgaagtatttgaaagtcactgatgaaaggcaagagagtgatagtgataatgagagtgatagtgatagtcctcgatacttctacgattttgaagatatgcctaagttggaggaggcagattttgtattgacattccaaaatatcaaaaagttctttaaatttgtcacatctattaagcgtctttcgttatgcttgggagtctacaccgaagaggtaatctgtttccatcaatctatcaaacttatttttgaacaatattcttgaagttgaatcttttgtcatcttatgcagtctttatatcatgagggtcttgtcttcaaccagcttgaacaattgaagatatgttcatgtgattcagattggtcaattttactttctcggttactcgaaagttctcccaatttacgagagctcgaggcttacgtgatagaagtaagtttcttcgttagagacatattccattggttcaatttactatattgtttaagccaaacttctcatgtttgatcacaggatcatccagataggcgtgtggatctaccaaatcagtggggcaatcagctgaattgtgttcctaaatgtttgttgtcgagtctcgaaacgttcaagtggagtgagatgtatggattgctgcagaaccagatggatgtggctaaatatatcttgagaaatgctcgatgcttaaagtctgcgacaatcttttttccgacaacctatgctaaagaaacaagagatgagatgatcgaggagttgtcactttcttttcaaggtccagagacatgccaagtcttcttccattgaggatgtgaatcataaggattcaaacttgcatttccatagacactaccctccatattacaatggttttttatttgcagcaacttgatctaaacttaaggtgttttttttgtctttgttttttttgtatactttatctttgagcatactatttttcttgagacattggctttatctttttctgagatcttaacaaataaccgaactttgaagagacaagacatgacatgaacttttatttgcagcaacttgatcataacacaagactcaaacacaagactcaaacacaagactcttcagcttatagatcataaagtagatcaatagcacaaaaagatatcaattagaagatcagtcaacaatatagatgttgtagaaatttgcatcctaataaagttcattacaaagaaatgacccaagtttcccacacatatccgcatcaaaaaaacaagtgccataacattgcattaagattcatattcatattaccaaacagagcacttgcacacatacatcaacacaaaaccggcaagaacatcataggaacactcatttgaaaaaacccaaggaatagattcgactatgtaaacacaaacaagtatctaggaaaatcaaaaacataagtaatagaagaatatgttaccttcaaagaagaacgagattttctcagcgctctcaaacccgggttctcaaacccgaaccggaccggaaccggaccattacccatttaacccgacggtttacccataagccgagccctaattttttcaaagaaaagggccctaaacttttcgtcttctcgcttcccttcctctatctcgtcttctcgcttcccttactctatcccatagaaaaaccctgaatttggtttggccaatgatgtcaaaactcttcattgatacttaagaaagttttctccattgttcttcttatggtctcattcacatttggtaagtctcttcaacgattttggttttgtgagcacttacttcttcttacaagaattacatgtctttgttcaggttgtaactgttgatctgtttctgtcacaaaatgggttcgaaaaagaagtgttttgatggttctagagatggaatcagcggtttaccagacgcaatgatttgtcacatattatcatttcttccaactaaagtagctgcttcaactaccgttcttgccaaaagatggaagcctttgcttgcttttatgccaaaccttgactttgatgaatccttccgtttcgatcctcgaatgacttgtgaagagaggagaaagggttctgaaagttttatgcttgtcgtggatagtgtattggctttgcaagcggaagcgaatgctacgttgaacaaattctacgttaagtgtgaaggtgttgagcaaaactcggtgcttgaatggatacctaaagtgttgaaacgtggtgtgttagatattgatctacagatcccttcgtctcgcggttttggttccaactcgactttttatcctctaccttcagagatctttgtgagcaagacattggttagactaaagatacagtttcaggatggtgccaacgttaatgtggaaggtgatgtttctcttccgatgcttaagactctccatcttgattatgttaagatggataccagaatgttacagaagcttctttctggctgtcacacgctcgaagaattattgctgatgaatttgatatggaaagaatcttcagaacctgaaccttgctttgtgagtgtttctgtccgaaccctcaagatactaaaattttctcgttttgaaaattttatgaaggctaaagattttaaaccgatcgtgttattgtcatttgatattccaaatctagtctacttagagtacttggatacaattgcggacaagtatgaacaagtgaggtttgactcgcttgttaaagctagtattggtctttgtaagacctctaaacagattgaaaatgacaataataatgtaacaaagcttttcatgggaatatgcaatgtcacgattctctacttgactgaagatactcttaaggtcaatcacatctttctcctaatctattaaatttctactcagatattgataagtgagtaatcatatatgtagttgatttggtttctctttcaggtacttggttgctgccgtgaaacaatgccggtattcgagaacttaattcacttaactattaggactggagtacatataggatggaaatcattaccacatctactcaagaattgtccaaatctacaaactcttgtcttcgaggtactgtatacatcctttaaatcaaccggtgacatgcttttgaaacacatataattagactttgatattgattcattttatgtttcagggaatgcatcatatatataggaaaggaagagcttgcggggacgtggacgaggatgggacgtgcatgtgcaaaaatctggataatatgagggtgaagaaggatattgatgcttgtctatcgtcaagtccggtgaaggtcataaagatattgaactttggtgaactttgtgggttttgtgagttttgtgatgttgaagaagatgtagcgggtcagataaagcaggtcaagcaattcctagagacaatgccggatcttgaaaaagtgatattgtactacaatacaccagaggatgaagatgtgatgaaggtgttcaagaaacttaagaagcttcctagagtagcttcagccaagtgtgaggtccaaataatctctgataacatcaacttgtcatttactttccgttagatgatcttttctggtttctcagccatggacatgtttcaggcaatcaagctgctacaagtttgctaaaaactctaaactctgtttcttccttttgttatttcctttttcttctctttattggcttttatcttacaaaccagtgaacgttttgtgttcttttgttggttttagtaatgaatttgtgtttttttatgtttttaatttgacgtgttagaaacttgcttgtcaggttaaaccaaatcaaacaccataatttatttagttaggtctgcaaatattaggtcgttgcctctaatatctaactgcttcagtttcatcaaacctctaagcaccaaagatgcaacaactaatattgaacaagactcaaaaagcgttagaaaacactacataacgtaccttcagttgaatgaatctcattgtgactgagatctaacatttggacaaatatagcaacttctcgaccgcggctatccgagatagtgttaagttactgagccttagacatacaatattattcatattcctgtaccgaaagaggtgtctgcacatggattcaatgctcctgtgcatcaacattctctttatgacttgagagatctaagagcagaaactcaacttgagagattcactaaaaagtatgtacctcgtggagaagagctacgttgtgctcatccttgtagtactggtcatgccaagaatcaagagccattagatcgttatacagttggagaatcatgacttgctttccttgcgactaaagcaatgttctctactgtcaagtttcagacgagcaacccaaacacaaaagtccacttgagagtttttcttatccgaaactggttcccagacaagttctttgagttcagaatcaatagtaacagtagatgagctaactccactgacggcttggtcaaagtaaacttagtagaagaggcattgaaacagccaggtccagatagaatgataataactcaatttattaacaccaaatacacgttaatataatactacaaatttcaaaatcaattacaaatcaacaattctcgtacaagaatgcatcgtgtatgacaaattaatattcaaacaaataatatataattgtgtattcaaaaccatattatataagcgtagagaataatatcatcaaagacttgtgttgagcaactctctgtaatctttacgaattccccacaaaatctcactgcattttttcatgcttggtctcgaacgtctatgaggagctagacattgaaacgccatctccaataccttctctaatgctaagttgttcgctgaattctgttctagcttcgggtccaataccgatatcgtatctccactcgtgaacttcttgatcgcctgatcaaatcacaaccattacacatgaatcaaaaacttgttgaacttactttatagtagctaagagaatgtttagtgttacccatctaatggtgatgcgttctttttgtcctctgctaagctcgatgggacgccgacctgtgagaagctcgacgagcagtacaccaaaagagtagacgtcacttttctctgtgagttgatacgttgttaagtactctgggtctaagtaaccagcggttcctttgacttgtgttgacacatgcgtggctcctgaatcagtatctggagctaatcttgcaaacccgaaatcagcaaccttggctctgtaattctcagtgaggagaatgtttgaagatttgatatctctgtggatgataggtggctctataacatatccaaaacaaatgtgtcaaggaacaagtactattgccatgaaagaaaaagaaggaacctatgtatacaatggacttacgtgtatacatgtgaagataggttatggcatgagctacatcggttgcgatatctaaccgagtcgccatgtcgagagtctttccttccttacctacaaacagattcacattgatcgattagcttgaaatgaatatatacaaaaagaagatagtagtaggatgtgtactcacaatccaagtgatctctaagagttccattggctacatactccacaacgagaatcttctcgtcgttatgaacaacaaatccatagtatttaaccaaactcaaatgagtaacttgagctaatgtctgaatctcactcataaactctgcatctgcaccttgacggtcgtcatgcatactctgcatcaagttagttacaatgttatagcgacaatctccattaagacaggacttagaaaggaatattcaaacctttttggcacgtttcacagcaaaggttttgccatctctgagtttgaccttgtaaacagtgccaaaaccgccttgtccgatcctaaaggacggagagaagttcttggtcgcgtcgtagatttcatcgaaggtgaatcttgtatgctctgtttcgtttgcatttccataactcctctgtacactactacttcctgttgagctacgtctactacggatattattgtctgctcacacagagaccaaataaaatcatcatcaactgtttccactaaaagtctaaaatctaagaattactgatcaaactataccggaagaggactttgaattgtcgatgtagttggaggaaacggaatcgggaggagtgaagcagttgatgaagataccggagatgcgacgagcgatggaggtggttgtgtcggtggatgtacgggcaggggttgtcgggaaggaacgatcggtgaaagtagtgttactgtaattggaagatgtggttgcaggagatccgacggtgtagctatgtctccgacgactgggcatcggaaagttcgtggagaacgtgtagcaatggtgaacacggaaggaaggaagagtcggagagactgactttacaattttttcaactttttcttctccgttgaaaaagacgactgttttgggtatttattgacgccagctgtacaacttgacgttctctgattaacaaaatttaaactcgacaagctaagataattaatgtgtataatttcctttttttttattacattttgtctaatgatttgtaataagcttttttattccttagatttaaattcgataattattaattttgaaaaaaaacgattggtttcaaattttattgaataactaaatactttgtatataatagtagttctcggcgttcagttatccattccgttatcgattttttcggttttaaagtttagtatccattcggttatttgaaagttctgttcggtttcgattttaaaatttagtatccattcggttatttcatttaaaatatttcggttattttgaatatttttaaatatttttagatatttccaaatatttttactattttatttatattttcaagtatttttagttatttagtctagaaataattaacacttttaaaaatatatttatactttagatattttacccaaaatattttggtttgtatttattcggttttatttcagatatttcggttatagaatttaatatttattcgactagtttccaatttttggttcggttcgatttaattttttttttcttcaattttggttcggtaaattcgattcaatttatttacagtagtactttaattcggtttaaacgctccaaaacagcacgtacatggaaaattgcatatgtaagattattaaataattttagtatttagaacatctactaaattctgtcattattgaatttatagaggataattagttcaatgccagacgtaatctatccgaatgatttgaaaattttcaactaatatcttgttagcgattattccgccgccaccatattaaatgccagatgggtctatctctattaatgcaataatcgaactcgcatttaatttgtatttttttttacaacaaagataccaagaaaaaggtataatatttttcttataaagttactattagatacattttatatgaaaaaggcttagattagaggaaataataaaatggtagattaaattactttgattagaagtcaatcaatattaggttacggttaacaaggaagattcataggcaggtgaaggatgatgagaattgagaccttaccagcaaaatattcaatagcctctgatagcgacagagggtttgaccttctgtagaatggaccatggtctaaaatgtttatagcccatgtttcagaaaacaaaagcccaatgattagcccgtatccttaaccgacgtcgtactatttaaaaggtatttaatgagatttgagaataattaggcaaactaaataaagtaaagtaggattacagtataattacttactatgatgaggttattcgactagagaaaaggagctctgtgtgtcgaaaccctccgtcgccagcatttattcttctcacttttcttcaccggagaatcacgacaacatcaaattctccggcgacatctcaggttatcttcgtttactgctctcatcggttaattattccatctctttttttgtttcccggagtcggctttcgtgtactttttgtttttggtcttttcggcttcttcaattttagggttcgcgtactgtttagtgttgtttagtttctgatttagatgtgcttactgtgttcatgttgtcgtctattcttatgagaagatcttatggtagagttacatatcaatgatgttaccaattttgaaggttattgtgttgtgtttgattaaaattggctcaagtgtgaaatgcttttgctcgcgtcactgttttcattgcaacttgactgaatcctagaggttgttttagaatatagattcaagtttcagctattgatgggacattacaacagagcataaggaacattcccatacctttgtgtttcttatggataactttggcatcagatcaactttttcttttgtcattttgcttattaacactgtaataatcacttgttattgggatttctcaagtctgctttgattaatcttgtttcgtaatgttcttctcactattcactcttcccatacctttgtgtttcttatggatgactttgccatcagaccaacttttcttttgtcattttgcttactaacactgtaataatcactttttttttattggggtttcttaagagtacttttgattaatcttgttgcattcaagtaatcgttgttcagttcactcttttcctgcagtggcagtgcatctgtaaaatgcttcaaggactgttgttcgctactcttgcttaattattactatagctggtgaaaatgggaggttgctgtagttcttcgaggaagtcacatcttgttggaacacctgtttactattatgtcagtaatccttttcaccatcttgcatttgtgttgctttgcactactgactatctatagattatgattttagttaaaacaaatcgggacaagagcatgattttagaatctcaacaatttcttgtaacaatctcgcttgagtggtcgatagtagactactagaggtcgtgagtgagctgtgtttgaaaaatgtcttctgaattatctacagttatttgattgtgacactctacaaagtttctatttattaaaagtttgttacgcagtgtccagaatcttttgaagagcttgtcccttcaggaacccgtgctggtgtgggatcagcattcaccacaggcctcttggttgatataggtttggagacatctatacctgacaccttttgtgctcctgctcctcttccatatgatttgcttttggggcgaccacaatgcacagattctgagtccatcaaaggaaggatgagtggaagcagttttgaaacgctagcgacgtgtgaagatcttggggaatcagactgtaaaactctagccagctcagtcattctttcaccgaggaaatcagatttctcgaaacatcaaggattgaagatattggttgatgaagaggaggactgttgtcctatttgctttgaaggtaagaaatcaagaccgttgaataaaaagaactctttaactcttgtttttatgagagagctaaacagagtcgtggattgcactatgcagattatgatgttgagaatccaagactaacgacaaagtgtgagcacgaatttcacctctcttgtcttctggagtggattgaaagaagcgatagatgcccaatatgtgataaggtgtgtttcccgcttgagctttctttggcagatcgattgtcttgatgatcaaagaattgcactttactgttgggaattcgtagttagatcaaccattgatggttgcgtaattagggtaaataagtgcacaatttggcaactaactaacattctgtcttctttaacacaggaagttgtgtttgatgatcgcttgaactagcatcattactatcccctggcttgaaagtttgaaggtgtggcgctttgtttggttagtctactacataattagcatacatctattttgtttcttcctcacacactttaagtgttgggtctccacatttccacttagttttgtcgtattggttatgttcgttttgcccttgtgcgatcatatagatatacataacaattgtaaatattacctagcttcttgttcgttcgtttgtgatctccggggtgtgatagagaagaaaggaccaccatttcagtattttgattgtttgcatcttcaaaatcatgtccactcttgtcttgatccatgattctatcttagcaatattggttaatgccctgatctgggaatcataataagcatgattttgtttgtttgtttggttaaagaaagagagagattctattagatatggatatagtataattccatagtctaaagagaaactgaatattccaaatagtaaattgatccacatgcgactagtcttgtcgtgtgtaagatattaaaaagaaaatgattctttgattaacaccttttgtctgctgcataaagtaattaattagaaataattaagaaaaaggttaggaatcatttaagaagaagagaaaaaagatgtcatggctttgacttctagccacttatgtctgccactgccacctccctcttctcaattcctattctgcccttctctttcttttagttcctatcctgccggtgttgatgaatgagggttaatatagtaactttggcgttaggaactatagttccaaaacctttttctgaatgaatttactttttggaggtatgaagtcacagcttttacagattttatcttgcaaaaattctctccacatttcaaacgtctaatagttaaagagagcttttgttttttctttcccatgtctatcagtatcaccaccgagaaaatatcatcaacaccaccaaccaaacattaacccacccgagagtacccaatgccatgtactacttatcttcctcttcttcttctcctcttccttcttccaccaccatctgtacaaagcaaagttatcatcaaaggaaaccaaaccattctgagtttcaaagctattttccggcttggtttcttcagcaccaccaatggttcctccaattggtacttgggtatctcttacgcttctatgccaactcccacccacgtttgggtcgccaatcgaatccgacccgtttcggatcctgactcttccactctcgagctcacctccaccggatacctaatcgtcagtaacctccgtgacggcgtcgtttggcagacggataacaaacaacccggaaccgatttccggttctctgaaaccgggaatctgattttgatcaacgacgacggttctccggtttggcagagctttgacaatccgactgacacgtggcttccggggatgaatgtcaccggtctaacagctatgacttcgtggcggagtctcttcgatccttcgccggggttttactctctgagactgagtccaagcttcaacgagttccagcttgtttacaaaggaaccacaccgtattggtccaccggaaattggaccggagaagccttcgtcggcgttccggaaatgaccattccttacatctacaggttccatttcgttaacccttacactcccacggcgtcgttttggtacatcgtcccaccgttggactccgtttccgagccacggctgacgcggttcatggtcggcgccaacggccagctgaagcagtacacttgggatccacagacgcagagctggaacatgttctggttgcagccggaggatccttgccgcgtttacaatctctgtggtcaattagggttttgtagcagcgaattgctcaagccctgtgcttgcatccgcggtttccggcctaggaacgacgccgcgtggagatctgatgattacagcgacggatgccgccgtgaaaacggtgattccggcgaaaagagtgatacttttgaagccgttggtgatctacgctacgatggtgatgtgaagatgtcacggttgcaggtaagcaagagctcttgcgccaaaacttgcttaggaaactcttcttgtgttggtttttatcataaggagaagtctaatctctgcaaaattttactcgagtcgccgaataatctgaagaattcgagctcgtggactggagttagtgaagatgtattgtatatcagagaaccaaagaaagggaattcaaagggaaacatctctaagtctataattatattgtgcagcgttgttgggtcaatctcagttcttgggtttacattgttagtgccattgattctgttgaagaggagtcgaaagaggaagaagactaggaaacaagacgaagatgggtttgctgtgttgaatcttaaggtattttctttcaaggagcttcaatcagctaccaatgggttctcggataaggtcggacacggcggttttggggcggtgtttaagggaacattaccgggttcttctacattcgtggctgtgaaacgcttagaaagacctggaagcggggagagtgagttccgggcagaggtatgcaccattgggaacattcaacatgtcaatctcgttaggcttagaggtttctgttcagagaatcttcataggcttcttgtctatgattacatgccacaaggatccttgagttcctatctgtctagaacaagccccaaattgctaagctgggagacccgtttcaggatcgcgttaggtactgccaaagggatcgcgtacttgcatgaaggatgcagggactgtattatacactgtgatatcaaaccggagaacattcttttggacagtgattacaacgccaaagtgtctgattttggcttggctaagctccttggacgtgacttcagcagagttctagccacgatgagagggacatggggctacgtggctcccgaatggatatctggtttgcccatcacgacaaaagctgatgtgtatagctttggaatgacattgctcgagctgatcggtggtagaagaaatgtcattgttaatagcgatacactgggagagaaagagacagaaccagagaaatggtatttagagaatgtcttttacttggaatcaattgtaagagagaaaaaaacatatacattgaatcaatgaatcccttttcaggttctttccgccatgggcagcgcgtgagatcatacaaggcaatgtggactctgtggttgactctagactcaacggagaatataacactgaagaggtgacgaggatggcaacggtggcgatatggtgcatacaagacaatgaagagataaggccagcaatgggaacggtagtgaagatgcttgaaggagttgtggaggtgacggttcctccaccgcctaaattaatacaagctcttgtctccggcgattcataccgaggagtgagcggcacaagctgtagtgaaggccatggctgttcggatctcaatacaggtttgtctagccctggctcacggtcgtcttttggtagaccttctccttgatcaattttgtaaggtgatttggtcaaaaccagccttaaatgttttaagtgttgctctctaagagggtttaattagtttaaactgtatttgttggttgtatgatatttgacttaatcgacattaacagttaaaaccatggattatgtctttcttcttagtttgaaagttcttgtcactttgataatcttctaatggcatatatgtaaattcttacagaatgtattgtatgagaatcattacgtgattgaatcaataaacccatgtcgatactttaaactatatgaacggtcacaataaacccatgttctctcttcttctactccacggctaaccttaatcttaggcaaaccagaaacacaaattacaagaacaaacataaaaaagaatctcttgtcttgtctgctttcaatcctcatgtctctaatcctccccaagtagagaaatataaaaacttagacaaatattgccacaaccggtgaaaatggagatcccggttcgagaggagagaagatcctcctcatcctctgccggaccattacaacaaaccatctccttagcagctgacgacgccatcgatagcggtccatcctctccgcttgtcgtcaaagtctctgtcttcgaaacagagcatgagacgaccaagcttatccacgcgccgtcaactctgctcggtgaaaccaccggagacgctgattttcctcccattcaaagctttagagatgctaaacttgtttgtgtggttgaaacgtctaagctttgggaaatagctgcacctatagctttcaacattctttgtaattacggtgttaactccttcacaagcatcttcgttggccatatcggcgatcttgagctttctgccgtcgccatcgctctctccgtcgtctctaatttctcctttggtttcttggtgattaaaataaccttcctctactctgcttttttcctcctctgtttcttgcgttttctctaactttctagaaaaaaactgcagctgggaatggcgagtgcgttggaaacgttatgtggacaagcgtttggagcgggacaaatggatatgttaggtgtttatatgcagcgttcttggcttatcctcctcggaacttccgtctgcttgcttcctctctacatctacgcaactccacttctcattttactcggccaagaacccgaaatcgcagagatctctggcaaattcactacacaaatcatccctcaaatgtttgcgctcgctatcaacttcccgactcagaagtttctccagtcacagagcaaagtagggatcatggcatggatcggtttcttcgctttgacccttcacattttcatcctctacctctttataaacgttttcaagtgggggctaaacggtgcagcggctgcatttgatgtctcggcttggggaatcgcgatcgcgcaggttgtttatgttgtagggtggtgtaaagacggttggaaagggctgtcttggttagcgtttcaagacgtttggccgtttttgaaactgtcgtttgcgtctgcggttatgctttgtctagagatttggtacttcatgacgatcattgtcttaactggacatcttgaagaccctgtcatagccgttggatctctctcaatctggttaaccgttagacctcttcacaaactcaaagatttacattttcttctatatctgataacacttttctttctctcagtatgaacattaatggatgggaaggaatgttgttcataggaatcaatgcagctataaggtaaaaagcaaaagcaatctttgtgtcttctaaaagaaggcgttagacttatatatatgtttctttcagtgttagggtgtcgaatgagctaggatcgggacatccacgagctgcgaaatactccgtgatcgtaacggtgatagagtctctcgtcattggagtagtgtgtgcaattgtaattctgataacacgagatgactttgctgtgatttttacggagagtgaagagatgagaaaggcggtagctgatcttgcgtacctgctcggtataacgatgattctcaacagtttacaaccagttatatcaggagttgcagtaggaggaggatggcaagcaccggtggcttatataaacttgttttgttactacgcttttggattacctctagggtttttgttaggttataaaacaagccttggcgtacaggtaaagccacatagcctccggtctaattattttggtttaagttgatgaaattgctttatgtggtttttcaggggatatggattggtatgatatgtgggactagtcttcagactctcatacttttgtacatgatctacataaccaattggaacaaagaggtacccccactcatttcaggttttataatcaaatctttcacacaaattgaagtaaaatgattcactatcttaatttattaggtggaacaagcttcggagagaatgaaacaatggggagctggatatgagaaattagaaaaaatagcaacttaaatgattttgggaaaaaaaattatatatacacttcactttatatcttatgttatacagcaatatatttttcattgtatatatcaattttttttgtaataccaaattgtatatgtcatcaaaatataatttatcatacatttgtaaatttttaatcttatcaaaatgatgatttaaatctactaattcgaccttattcaatcatttcattatttttacctactacggccgattgtcaggaataaattaggccggacaaaaatccagaatcggttatccgaatcgaaatcaacccaaaaaattggatccgaaatcaaactcgaacccgaagatttatcctattaggtcttaaattcttctaccgaaaaaaacgaacccgaatccgaaaatactcaaatattttattcaaaaatctaaattttacctgaaactcaaaattttacccgaaaatctggatatttacccaaaaaatctggatatttacccaaaaattcggatatcgattccaaaaaagggtctaaaaatctatatccaaactcgattggacccgaaccgaaattgaaccgacattttagatttaccctattggatcctaaacttctaacccgaaaaatctgtatccgattggattttatccgaatccgactcgcttacccgaatgtccagtaaatgaaaccggtctacccattacccggtttggtctttgcttcccagagaataattcttttgtagagtatattttcacacttgcagcgcaatcgaggcggtttttggttgcaatcgtctcatcacaatcacatcatcatcgtcttcgtcttcttcttcgtcggcacatactttgtcttctcatctcctccattattttgatcttatcgcaacagatctctcatctccttcacttgttgactgtgtaagtctatccgattctttcgtcttccctggatttttttctccgtcaacgatcctttgttcagatcgatctgtttcgtctagtctcagtttcaatttcgtgctttgattggtttatgagtttgatttattggaatatatgatcttatcttatccatggttgacgatcgtgtctagaatcgaagttgctgaatagctttgatcgtcgttagcttatatgaattctgatggtttttgttattggatcagcttaagattattcttgttgatttgttgttatttgatcaaattttgtagttataccacaggacaatggctgacaaagatgaagcagcgacgcgtggaaatgattgggaagttgtttctcttactgcttcagcttacgctgctgctcctggtcctaaaccagtagtggactcgaaagatgatgatcacaaggaagttactccttgttacgaagctgagacatctcatcccttatacatgtctcgccactttgttttcccaccaactggtcagcttgagaatactagtgaccttaccgaggctagcttaacggggtctcattgcaaggaagggagtgatttgagtctgaaagggttggatttatcagatgatttcggaggacttgagttttccgaggataaaggcaagaaagaagaaaacatttacacgacagctatgagttctctggacgatgaaagagctatcggtggctcacacgtgtatgaacctgttgaagaaccgaccgagcctgtttctccttctgatgttacacttgatctgaatcctattaaagatgatgaggtagcaaactcgccacctagcgaagaagcttggtggaaaagaagcgttgcctctttgattgcccaagcgaaagaaactaatacagtttggtccatctgcatagccgcagctgtaatgggaattgtgattcttggccaacattggcaacaggagaggtggcagattttgcagcaaaagtgggaatcaagcattggaaacgaggtatttagtttaggatcactattcttcgaacctccatggtatgatgtgagtcttaactatgtaacaacactctttggttgcagaaagctggaagattgatggggccaatctctcgactaaaacaagcatttgtcgggggacagcggcgggattcattcatccgagccagcgcccaaaacgaccgttaaatcaaaacaaaaaggtgaattactttgatgatgacgataagaacaagagtagcttctttggggtcgaaaaacatggatgtctggtgtgtgaatgtgtttggtacttctcttcaggtcatggtttttgtacatatttctttggtgtgaaacaatcatttacccatttcattatctcaatgccctattactctctttctctgtttatatcataatcagatactcagtgtctcctgttatgtttttgttggtcaaattgaaaactctttattttggttagagaattttgaaaacaacaaaaatcacattcacattcaccctatataccaacatttacatgatcttacataaaaagaaaaaaaaattatcatgaaattttatttatgtttaaagacgaagatatgaaaagtattatatggcacgattgaataatatattggtagaacatttttatttcaatagtagaaactaagaattccaataaaattagttgtaaagacaacaacattgaagagtgtctacactaggattaggaatacacaaagcacgactaggtttgcctccacaagtcgggatacaatcatttttcattcggcatggtcctttgaatttcacattatagaaacgtatcatccataattcctgttcgatcattttacaaaatttatcatcaacatcataattctctgttagtaacttacatgattgattggtcttgttctttatgaagttttttttttatctttgtttgagaaaacaatcataaatatacgtatcaatcacaactattttctttatcagccgtatcaaccacatttaatgtgtgtgtgtgtgtatactatgcttttgcgaaaattccatatacactacatataaaacttattcatttccacatatgtacatgacttattcaaaactcctataaataaaattcacaaaagttcaaattgttaatcgttaagtaagtttttttttggtcaaaaaaaaggttcgaaaatctaaatcgatgatactatatagtttacaaaaataatgtcaaacttttgcattttgtgttgactttataaatctttggccaaaaatattgtatggttaaatgaaaatgagatcgatttctaacttagacaatattaaagatcataacccaatggaaagatcatctctagatctgtggtaactcaaaaatttccaagaaaaaacatttagttatgacattttggtgataaggtccatgactaaagagccggtggatattttttttacttaaagtgtgttactattaattctttttgttgtaaagcacaatcaaagtccatgactaaagagcctacatggtatatgaattgttttgaattttccatgcttggacttttatgggattaagattcggactccatcctccattagtcaattggagaacatcatccgactgtttcatcgatttccagatattaatgccataaataatttgaacttacttttatatacttcattctttggtctccggattgatttacagatatcttcaattttcatctccactattgtgcactataagactatcaccaattgaagtttattaaaatctatctatgtgtcaccaaaaataagtcaactgcgatattaaatgtttttacaaaagtaggttggcaagcaattaacaccggcaaattaaatacaacaatcataattcatcatttgtatttgatttctttttttaaaaatgtactcctatttttttaattttttgttcgacaagtcaatggtaagagaaattgtaaacatagctgatacgatgcggttgaatttgaattctttgcgttagattatctgcttttgtgtttgcacttcaaagaactaaggataaagaaaaagaatcaaattcctccatatcgttctgtatcgcctccatgtacgtaaagaaagttggtcactcttacggaaagacaccatttttaccaggtctgagcaatttataaggaaagctatttttcacttgccttgtactctattaaatactagggatgattcagcatccgcaaacagtaaatgagaaaccgcatgacttgcatttaccacctttatactaattattaacttatctatttatgctttctgaatattagcaatcagcacttttgtgcatagtacatataaatatgaggagagaggatcttcttgtcgtaggccgcattggggagtaattaagcctcttgattgaccgttaagtagcgccatatgttagactgatgtgatacaccacatcatccattgtatttatgtctcccaacaatccatttttcataataaactctcgataaaatttgattcaatctgatcataagcctttcatgttagtttttataaccataaactttcttttgtatgacgaatttgttcagagaccataaaacatctcttgcgttataagaatattatctaaaatcaatggtctttcgataaagactaattgtgtttctaaaacaaaatttatttttctattttctatttatttaattttccttctcatttttagttgtttttataatatactaagcgaggtagtataaatctagaatcctgaaccagcagtcaaatatcactatttaaagctaactatttaggtttaataataccttaggatattattaccatttacgtaaaaaagtttgaacctggaaaacatatatatctacgtagagtaccgaatattctaaaccatttaaaatattttataatgatcaaccatgattgaaatcaagtagaaaaacttgaacaatgatcttctagttcattttagttgtttcacttaaaaaggatttaaaaagagagtcaacattgcgttttaaatgcattttgaggtttggcaaaccatctacaagctatctgacatctacagactacgtacagttgtgttccatttgttacaattacaacaatcagcttgtttgtttttggcaaattaagagtcatgagtgtgtatacgaaattactttttggtggtctgaatttatgaatgcagttacactaacccttcttcaaaaataaaaatgaatgcggttatactaaactatcaaatatatctactagcaaatatgaaactacattcagtaacagtgatctctctttttggatacaagatgaaacattgttctcttctcatgctctaaatagaaaatactctacgaaatgaaaatgtatgtcatcttataagaactatacatttttactccgatggttaattctttgaaggattctcgacagtttagaagtctgcaaaaaatataatctcataagaaaaaaattctaagtctcttgatacaatgcatatagaaactgacaaataatcgaagaaattgtacttgagcccattacgactattgaaaattctgattttggatgaattcagcggaaactacaaatttaagagtactttatgtgtataatatgaagcctatatatatagaattactaatgtaataaaataagaaccggtgaaaagggggacaagatcacaaggttttcgcattcagtgcctttacagagttatatatttgatgatgttattgcttacttgcctaatagtactatactactatatatatctaaggtaacacatgtatatatatgtcacatagacattactagtatatattatgtacttctatcatatatttatgatattgcagttgcagcgtacacaagtcagctccttttgacttttacatctcatgaatgcattgccatgacatctaatcttactcgagatttgtgcatgcacattattcacttttgtcttttgcaatttttgttattgtaaaaaaaggaaaaacaaatgtaaaagagagagagaccagaaaggtctaactaaacctaaagagtcaatgaaatgtgtttctttcttgtgggattaatcaattcactctttaacacttctttataccattgaagaaattagatgaaagagtcacgagttgcttaccaaatccctcacaagaattgagaactgataaaccaaattgagaagattaaatatcacgtctccttttgatctctattataattaatcgaaaataaaaataagagttttcaacaaaacgtgatcattggtttacgatcacttgcaaagtcaaacctaaaacgtagcattagtacactaaccttaaatactaattatatcatgcaaaccctaatgtcattacctaactatacatgtgtaatgtgttcaacagatcttcttaacccacattagatcaatattaaacaataaaaagattcttatatattctactacttacttcttcttattcccatccatatttttctgtgcctttaggttctcaactaatctcatttaatttagctagcacacagagaaacacacacgtatataaataatatgataacacacaaaaagactcatatatataaataattagagtcattaaatgtggattcatcattaaatgaaacaactcttcttctctgtacaatttctcttcacaccttcaccaaattctttgacttcaaaaatcttataaaatttatatatctccaaaaccataaaaccaaaacgagttttcacaaataaattacttagttgaaatttcaaatctcattcaattagggtacactctctcaacaatccacattaatgagggttgctgcttctgatggctagcagtaacagttttatcgcctccacttcttaatgccatctttttcctcttccctctccttctctatatatattttctgactctgcaaaaccttaattcatccatctctcaaacaccatttttggaaacaccatttcatattccttaaacttttccattttagtatcatttcatattcattgatatggatgtctccaacacgatgctccttgtagctgttgttgcagcttactggctatggttccagcggatctcaaggtggctaaagggtccacgtgtttggccagttttgggcagtcttccgggtctgatcgagcagcgtgaccgtatgcacgactggatcactgagaacctccgtgcgtgtggcggcacttatcagacatgtatctgcgccgtacctttcttggcaaaaaagcaaggtctcgtgaccgtcacgtgcgatcccaagaacatcgaacacatgctcaagaccaggttcgacaactaccctaaaggtcctacgtggcaagccgtgttccatgacttcctcggccaaggtatcttcaactccgacggtgacacttggctcttccagcgtaaaaccgccgctcttgaattcaccaccaggtacgtacttaccttaaccggtccggaccgggcattctttcatgcatgtacaattcacaattggtccgactgaaccaaattgaattttcttatcttaattatgtctttctttggttcggttatctaaattgtcggctaaattaaggaattggcttctgtgatgcaggacgttgaggcaagcgatgggtcggtgggtgaaccggggaatcaagctccggttttgtccaattctcgaaacggctcagaacaattacgagccggttgatctccaagacttaatactacggctcacattcgacaacatttgcggtttagcattcggtaaagacactcgaacctgcgcaccgggacttcccgagaacggtttcgcctcggctttcgaccgagccaccgaagcttctctccagcggtttattctaccagagtttctatggaggctgaagaaatggcttggactcggcttagaagtcagcttgagccggagcctaggagagatcgatgggtatttagatgctgtcattaatacacgtaagcaagaattgctgagtcagcgagagagtggggtccagcgtcacgacgatctcctctctcgtttcatgaagaagaaagaccagtcgtacagcgagacgttcttacgacacgtggcgcttaacttcatcctagctggacgtgacacgtcatcagtagcgttgagctggtttttctggctcatcacgacgcatccgacggttgaggataagatcgtccgcgagatatgctccgttctgattgagacacgtggaaccgatgtatcgtcgtggacggcggagccgttggaattcgatgaggtcgaccggttggtttacctgaaggccgcgctctctgagacgttgaggctttacccgtcggtgccggaagattcaaagcacgtcgtgaacgacgatatcttaccggacggaactttcgtaccggcgggatcgtcggtgacttattcgatctacgcggcggggaggatgaagagcacgtggggagaggattgcttggaattcaaaccggagaggtggatctcgccggacgatggaaaattcgtgaatcacgatcagtaccgattcgtggcgtttaacgccggacctaggatctgtctaggaaaagatctagcgtatctgcagatgaagacgatcgcggcggcggttttactcaggcatagactaacggtggcgccgggacacaaggtggagcagaagatgtcgttgactttgttcatgaagaacggacttttggtcaacgtgcacaagagggatttggaagtgatgatgaagagtctcgtacccaaagagagaaacgacgtcgttgttcttaacggaaaatgcaacggcggtatcggtgaaggcgtcgccgttaatgcggctgtggcggttgccgtgtaatgcagcttctcgggttgataacatttttatagtaattaatacatacatttacctttgggttttgtgattgttgtgtaaaacagtaaaaaaaatgatttcgttgtgctatgtaaactttgtaagcaaatactcttcttcctaaagtaaaaaagtttgattgtttttgttttggtttctttttctccatccccatcaaattgtaagcttcaaaagagtcaagttccaaaaaaatacatcttttctttaacatgttactttatgaaacagaccagcgaaccattttgatctcactatcagatcaaatttataagcagagaaagaacaaatataaagcttcctcacacaatttcactgcagctattagtttcttggttctagtcgagaattttttctccggttgcgaacaagttccagaccagagttccaattagatacagtgcaactgctactttgaacacatcatcccatgaacctaaatgtttaggtaaaaaccaaacaacatggttaataatagtcggaagtactataatttgtccaccttatggttggcaagaatgtgaataaagatagaagatacctcgttggaggatgtaaccagtagctgcagtgccaaagacaccagctaggactcctgctgtgtttgatagtcctaagagtacaccctgcgagccaagccatagttaatgaagtggaacaagtttggtgacaaagtaataaaagagaaagaattgatgtttatctcacagcgtatcgtgggccaatgtcttgatgattagagtagagacccgactgagagaatgcatcagagccctgttggggacaacatgagtctttatgtcagagctgtacacaactcatgaatttttctaagggtgacaactgtttctttttgtagccgacattgcatttaagttggggttcaattatagttgtactctcacaagaataatcttgtgtcggcaggtgtgaaataaaaaacggcaaacatgtttttaacagttccaaacttatccataattctatggctctttcaatcatatgatctattgacaccaatacctgactgcatgccatgcagagaactgccattgctggagttttgacatggctcagctgactcaggaagaaggcagggcctagaaaaccaattgattgcataatctgcaataatcaagagtttattagtcgtgagtatcctttggagtagccataatagattcatgagagtagtttattggtataaagggtttgttgtcactcctttaactgaaagcagcataacaagtttggccttttgaggtagtagagacatgtaaatgatcagaaagtgaaagagtgtatttcttgcctttcgaacgtttgtaattgaaagacctctgctcacaagagtatcagcaatccaacctccaatattagcaaaaacagccatggttagccatggcaaaacgcatagtagcccggattcagtgaggttgaacttcaagacctgcagcgtgatcaaagaccaacaatagagaggagtctctttacttgttcacaaaaaatattaaacagtaaggatataactgaagctgaactccgtgcctgattgtaatatgtgggcatccatgtcaatagtatgaaagttccccaattatggcagaagtgggaaattatgagagcccagactgggggtttagacagtattagcttccatggaatcactgtaacaggttcccttggtttgctacctcccagtataacctttttttcttcttcacttaggtccgggtcatccttgggagagctatatgcctgagaagaattaaaaaggtgtttaaaatataaatctcttggaggttttgtagatctcagatatttagcttatgtcatgaagaggagttcatacaaattttagccatagcaaaaaccatatacttccgagggagccaaacgagtagaaaacagatggccatccgaacttggtgattagcataggagagaatgccaatcctgtgacggaaccaagatacatgccactatagaccagtgcaagcgatctgcttctctctgagacagggatccatttagaaagcatgttgttcatagcaggcattgcaacaccctgaagcaaaggtagacagaaccagctagtgagaagttgtacaggtctgagacaagtatagcaagagaaaagaagaacagaagaggccaacctcgccaatgcccatgaacgcccgcactacaagcaaaaaaggaagaccaagtctagcagcaataggtgtcataatagtggcaaaggaccaccagacaacaccaaaacctaaaacaaccttcccgccaaacttatctgcccatatacctcccagaatctatgtccaagagaagatgagctaaagttagaataaatataccctctctttcgagttctataaaagatcagattctacagagagtgatagtattagacctgacctgagtaagtaaatagccccagaagaaagaggactgaattaagccaacagttgcactactccagttatattcttgtgacatgggaagaattgcaatgctcatgttcacctgccacaagcatctctcattaagtaatatatatcttacttcttcagataagtagagaaaataagcaagatatacaacttacacggtccatattgcaaagaagaaaagacgaaaagcataacaagacgatcacccagcgtctaggaaactgctgccaccatggagatgcgttctgtagatttccttcaactaaaatagcttcagctgagccatcagccgatggcacaactccttccgtgatatctgactcctctgatttgtagtaagcacgagatctgttgatcttgatactgttcctaaacctaattacactgtccattcttggttgaaggaaacatccaaaacttcttctcatgtgtcccgattcatgatgtaaactagcttgcagaggttgatgattacggcacaacaatgctacaaagattaagaaaatgcttaagcacaaattgcataatatagctaggtagagaggtataaaagataccgatatataccatttggaaaaagcttggaaacctctgcaccactttttccaagtctctgacaaccattgcctacaaagtaaagcaatcttagcaaatttggaagcaatgcacacattagtgatatcgttcgctacacagaagcaagctacgctcaagcctaatcactaacataatccgataaacaactaaaaagccctaacagattcaaaaagaggagggggatagatatacctgagccgatgaaggaaccgaagttccgatttgaaatcaagccaccgagggccatgttgcttctcagaacaaaaatgtcaagggaagaaggagaagaagaagagagaaggattcaagcttcttccatagaagcggagtaaacgaaggaacctttggataaagccgagagagagactgagagacgctgaagcgggaaaatccctctctattggggaaggaaggaagaggaaaggggggtcgatatagtgacacgtggcacatcatcttctactcgttggaacctccgttctgttctcatttcatgaatctacccccacgttgcaaagaggaaacatgggtactattggttaatggcaggggtattattggaagttattgtggaaaatatctgagccgttaccgccgaagatgacgtcacctttagagaaatagagagagctgacaaaagaaaaaggtaggttggttaatatattgggcttacaatctcatttgtatttttgatgggcttaaaaataaaattgtcttctacatttttttgtttccatttgttcaaagttccaactgctgaaaagtgaaaacaaagagacatttattgctaaagtgcagcccataaaataactaaaatactaaaattaagcactaaaattgtacaacaatgtcattagtttttactaaaatcttgaggatttgtcattttgaacacttaaaactgtatgtatatataaaatgtttttgcaaaatatgtactttaaaccaaatactaaattttaaaaacaaatctaaccgactatatccacgtattaactggtatctattattaactaaaaatggcaaattcacaaactatatggaaaattgcaaaatcaacaaatgtcactttcaaaagtggctttctcataattgattctttttataaaaaaaaaaaatgagacatatattaatatatataacaactttggtgactataagctcttagagtaaaacaaagtcactatattaaattttgagaagaaaaataatcctggaaaccttaatgttttatgatacaattttacacatagatatataattacatactttgaccagacacatattttttaaaaaaaaatctccagtcagtggctatttgataaagccactaaaaattcttgaccaattttgtggccactatattgcttatagtataaatcattcacaatttggatcataggttttattcatcaattttgtccaaaaaaaaacttaaaattttgtcaaaaaactatagtataaaataggttttgtcaaaaaaacttaaaattatgctatttgtgaaaatttctcttttatctatttttaaattactttgttaattaatagtgctatattcttaattcttgtataaaaatgtgttattcttgcaaatcaccctctaatttttctgatatattttccaaaataaaataactcttcatcttcctcactcactctctctctactccactcttcatcaagcgttgagtcatcgccgtgttgttccttttccttccctctctagcgtaagctccagatttcttctattctctgttttcacagtgaaatctctcgtttaatgaattttttcgattcccctatgcatttcgtgatttaacgcctttactcacttgttacttaaaaatatatttttgatttcgctaggttccttatcatgcatgcgtcactctcttagctcaattttgtaaatgctgtatcactttcgtctcttttgctttatccagtgtcaattttgttttgtttgttaagttgttgcctagggtttctcttgctcgtgggattgcctagaaattgagtctcttttgggccttattttgttcttcttctctgtttttgtaacattctttttctccaggtaaagcaggtacgatggacatttctgatgaagagtctgagatcagcgagtcagagattgaggagtattctaaaacaccctaccaccttttacgcagtgagacttactacaaggtgaaggtgaatggacggctcagatgccccttttgtgtaggcaagaagaagcaagattacaagtacaaggagttgcatgcacatgctactggtgtttccaaaggttctgccaccagaagtgctttacagaagtctaatcatcttgctttagctaagtttttagagaatgatcttgctggttatgcagaacctcttccacgccctccggttgttcctcctctgttagacgagactgaaccaaatcctcataacgtctatgtctggccatggatggggattgttgttaaccctttgaaagaaacggatgacaaggagcttctacttgattcagtatattggctgcagaccctttccaaattcaagcctgttgaagtgaatgccttttgggtcgaacaagattcgattgttggggttattgctaagtttgacagtgactggagtgggtttgctgctgccacagagcttgaaaaggaatttgagacccaagggtcctgcaaaaaagagtggactgagaggagtggagattcagagtcaaaggcttatggttggtgtgcacgtgcagacgactttcaatctcaaggtccaataggtgagtacctctccaaggagggaacgctaagaacagtttcagatattttgcaaaacaatgtgcaggatagaaacactcttctggacgtactttcaaatatgattgatatgacaaacgaagatctgaacaaggcccaacacagttacaacaggacggcaatgtcactgcaaagggtcctagatgagaaaaaaaacttgcaccaagcttttgctgaaggtatttactcacacactgatatgtttccgactcatatagcatttagggtatctgactattttttgtactttatctcctctcagaaacaaagaagatgcagcagatgtcacttcgccatatccagagaatcctatatgataaagagaagctaagaaatgaactggatcgtaagatgcgggacttggagtctcgggccaaacaattggaaaaacatgaagcactaactgaactggagaggcaaaagcttgatgaagacaagagaaaggtaatatcgtcttcagtatgatacataggaaacaatcagtctgttcatatgtatgcatttctcttttccaaggaaccaatgatcatttttatgttgttttttttgctttgacagagtgatgctatgaacaaatccctacagttagcctcacgtgagcagaaaaaggctgacgaaagcgtcttgagacttgtagaagaacatcaggtatattccttcatagcacactacttaaactgaccaactttacctacctgttttgtgtctgagtttgaaactctctctttgccagaggcaaaaagaagatgctttgaacaagatccttctgcttgagaagcagctagacaccaaacagacactggaaatggagattcaagagctaaaaggcaaattacaagtgatgaagcatctgggggatgatgatgatgaggcggtccagacgaaaatgaaagagatgaatgatgagctggatgacaagaaagctgagttagaagatctagaaagtatgaactcagtcctgatgacaaaagaacgccaaagcaatgatgagatacaagcagcgcggcaaaaaatgattgcggtacagatttctaatgctttagtgttcttgggtactgatagagttgcatttttgccattatctagtattttagaatactcaaaagattgctctttgatccagggtttgacaggattgttgggtgccgagagcgatatcggagtaaaaaggatgggagaacttgatgagaaacctttcctggatgtttgcaagctgagatattctgcaaatgaagctagggttgaagctgccaccctttgctctacatggaaggagaaccttaagaatccatcatggcaaccattcaagcgtgaaggaaccggggacggagcagaggtaggttcattccttttacaagtcttttatatgactttgaaaagtatctggtctttctccctctctgggccactgttttagttaaatatggagtaacctgtgatttctgtgaacgttgatacttgtatacatatgttggtacaactgtttttgtttttgtgagttagcggtaatggtgttagatgttaatggttacaggaagtggtagacgaggatgatgagcagctgaagaagcttaaaagagagtggggaaaagaggtgcataacgcagtaaaagcagctcttgtggagatgaatgagtataatgcaagtggtcggtacccgacttcagaactgtggaacttcaaagaaggaagaaaagccactctcaaggaagtgattacgttcatttcaaccgacataaaaaatctgaaacgcaaaagaacctgaaggtatgctaaatcttcttcagttgacacaggtctccttatatagcttatatagtaatgtgctggtccaaaactacgtacactacataatccgagaaacgtgtaaaaggtttagggtagaaactcgtcaagaaaatactgcagaggcatgatctcttttgttgacttcagttaaagaacttgtcaattatgatctggtctggctttggtcttgcgccattttgatttgaactgaagaatccaatggtcttctacttttggttgcaggattggagaagcaggaagaagaagaagaatattaaatggttaagctttttgtctaataaaattattaggatgctcgtatgctctctatggagactaatttcttaaaccttttgatttgaaagaattcgaatctgtaattattgtaatcttggtttatgctttttgttttaagttcttgttaaaagccacctaaaatgatgatcaaacaagtttgtgttaagattattttggcatgtaacatagtcaataatctttttattaaggtttcttcttggcttattttggacgagttaggcagtatcttaatagtagtaacaaagctttagtttttgtagttcataagtcaaaagctttgaacaaaacagtgttatcttctataccagacacaaaaactgtgttgtttatatagttaaatcatcctgaagcaatgtgactaaattttttgtaaccaagctatatttgcattgctatggtcttgttttgtgaccaacagacttggatgcaaagtaggtataacttgctaaatgtctgattttggaaataacttatgaagagaaaatcttcatttggtaagagttgttttctcaatgtaacagtttactcatcattttcaaactccaactctcacagaacacaatcaagttacaaagtgcagatgcttatggttgggaagctttacctaacaatggtacaaggcggttttgtcaggaacatagattcgttcttggagttggtacaagaacttctaaaagacaaagatgaggtataataaggacaagttgacgaataaaaaaataaatattataacgtagagaatctttcaaccccaaaaaaacaaaccagaaagaatcaaatcctaaatccgaaaaacaaaagaaagcattatgcatagcattacgatacaaaaaaccgacaaatctaagtaactagtagctctagttcttcgaagcatcaacgaagtaagacgtaaggtcagtcaaacgcacactcttatccaacatagcctcaagctctttagcttgcatcaactgaaacttctcttcaacaatcttcttagtctcaagagtaaacgaactccatttctgcctcacataatactcatcaatacccgaaccagcaatcatcctagcaagagacgacttctcaaaccaatcatctccattagttgaagaaacaccaacaaacgccaagtcttgctttacagaatcaagcttctccttcgtcttactcgcactctttttcgacacaccgttggacttagcattagaatcaagagctattcctttaggtccccaaataaactttgacaattcaaaagctttcttatcatgagctttcacaaacctaggttcgtcctttccttctttagcacggtacttcttccttaaactcctaaccttatccgagaattgactcttactaacctcaaagctgatagatttcttctggaactcgtaaaacgcattagtatctgcggaaggagacttccctgtatcagcatgataatctatcattccttgtaacatagagatttcgtcatcgtcactccatagtctttgaaaaagtgctggcttctttacactctcttcatctttcttgactcgtttcgttgaagtcgtcgcagcttcactcgctgccctctttgctccagatttcaccgccggtaaagctaaagtagcagtcgacgacgacggatcatctttcttctttgaagcgattgttttaccggatccagatttcggaggatccgtcgattcagaatccgaatctgtttcactctccgaaccagaatcggaatcagcagcggcggagacggcggtggatttagaaggagcagcggcggagacggaggtggatttagctggagtagcggcggagacggcggtggatttagcaggagcagcggcggttgtggcgggaagggatttgattggttcgtcttcttcagatgaagaggaatcatcttcggaagtctcgacgtcatcttcgtcgcttgaaggtgccgttggtggatcgagtttcttcgtcatcggaagtttcaaaagagcaaatcggaattttcgagagaaagagaagatgagaagcttcttagggtttgtgaggaagatgagaagcttcttagggtttgtgacgaaacgatgataagtgaaaaggaatatttataatcaatttcgatattctcaaacaataattgcgaaatttgctttccttattcaaatcgtttcatatttccaatgtagcagttcccgttaaaattccattgttctatgagttaaacaattaatattgtcattaaattaagattctaaatctcaaagaatattatttgttaagttttataatcttattatataaaaatttttgatttgtctaatgttagaaattgtaatgaaagagtaatttaggtttaggtcatgacattaatgactaatcataataagtacaatttcacatttttgcttattatatacaaatctttgatttgcctaatgttcccatggatctcattctcatacaaatcataataagatctcattctcatggatctcattctcattaacaaatatttggtgaaggagtttaatattatgtataattaaagcccactaaaaactaatatagaaattgtaatgaaagaataatttaggtttagatcatgacattaatgacaaatcataataagtataatttcacatttttgcttcacatattttcgcactgtaatgatttttttgctttcatttcatttttctgttaattgtatatatacagaaatatctatatacagaaatatattcatttcttactgccaatgtttataaaatcatcccaaaaaatacaggaatatgagtttctttttaatgaattggcaccaataatataatacatcaaatcccaagttttcgtctgttacttaaatgatgataatgtagacatttttacattggaactcaaaattcatgatctcttgtccgccaacactctcatgatgataatgtagacatttctacgttggaactcaaaattcatgatctctcgtctgctacactctcatattgatatcaccatttttcaattcggtaaaacgaatctaatttctctaaaaataaaagaaattatgacagtgtaataaaaagtttttttgtttttttgtcaagagattttttataaaagcgtatagttaacaatgatcttatttagtttgttaaaaatttaattatttttttcaaaaaattgctacttttgcaacaaaaaaaaaccataattaatcattcacaattccaccgaaacatagttttattcaaacatatatacgtcgtatgtatttacatttgcatgatccaaaatttacttcctccaataaaattttgcactttaaatagaaagtctctatacacatccgtatagaaacgggatcacaaaatagtttttaaggatatagttacccgttcgacattaagaacaaaatagaataaacataacaataacgtaccataatgatgacaagagctcaagcaattacacacatgaaaattcgtatatgatccaaccttacttgcaataagtcaatgccaagttataacaagaataagatattcacttcttggtgttgttgatagactccaccttgccgtcattacctccaagcaaaagatatttatccttgcgagtaagttcggtgcattcgaagcccaaaaccgcgccgataactttctggacgtaattagccacctctataggagtcttgccaccaccgttgacagtcatttcttcaggcaaacgatccaagaaagtggcttcatagcttggtcttgggttcatgaagaagaagtaagggtcccaaaacttcacacccctaactgtggtcccgttgaacattccttgtttacagttcatcgctactggcacaatccggtcgcttagctctgcgaatagagcgctaaatctcagtagatactcttctctacacgtcgtgccttccggacatatcaccaagtcgcctgttatacaccaaaaacatatcattagctcaacaactccattgatttttaatttctcaactaaagattaatgtgaatgtaagtcaatattcaaaagaagtaaacaatattattttatgttcatttatataaatttggttagaagatgcgttaattaggtaccaaagtaaacatcaaagaccataccaaagtaatatttactatattgagatttgcatgggctactatatatgtattcatcgaaaaataaaaagaaagaaatagaaactcctattgaaccccctggacagtgaaacttgttataggtatgctctagtaatatatgatgagaagatgtgtaaagtacctttctcgagaagttttctcatgttggcagcatcggtggcacggtcacgggtgagggcaacagcaggaataggagaaagcataagggagagacgagagacactgtaagtgacgcaacagatcttacgtccaagagcaatagcaacgatgatgggatcaagcgcggtacggtggttaaggacatagaggttgccaagagttccaggggaaggaggtggaggacgatgaccacgaatggttaagtggatcccgagcatctcgtaagtgtaacggacaaatctttcaggtaaagggaggttgaagtagacgcgaatgatggagaggatgaaaccaaaaggaagccataggtatgtgataatggcgtttaacggagttggacgttgcgctaaacgcccatcatggaagactatgcggttctttaagcgttcttttggaatcgttgtggctgacttggtcgcatgaaccatgtaacctttctgttataataccaaaaacgttattcatttcaaacttataactaaaagtactaggaaaatgtaacatatctctaaattgtgtaatcaagattcaaaaaactaagcattaaacaacagaagattgtttatgatatttcaagtatgtgttcattaaatggacagcccaaaatgttggtggaactagtaaggtggttggggatagaaaaataatccagagggtcacgtgaagtgattggttggatacatttatgaaccttactaattgcttccaaatcaaaaatttcattatttttataagattcacgcgtagacataatgacactaaaccagtcaacaagttaaattagattatctagcttaatcaacaagcaaatcaaacgtttgcttagattctcaagttacctccaaaacacatcttacactaaaccaatcaacactcaataattcaacttaactttaccctataatcgaccaagattggataaaaagattggaacagtaccttgcagagagacatgaaatcatgatcagaggttcgatcaccgaggccgagatcaggtgattcgttaccaaactcttttaaaatggctaacctcttaagatcaccaacaagaacaccaggcttcttcacaaatccagtggctctattggttttagggttaacttcaatctctgttcccaaaactttatcacctccaagataatccttcacaaacgcctccaccatcacaatcggattcgccgtcactaccacttttctcttacacttatcaaacacctcaaaactgtctttcctcacatccgccgcgtaaaacctaaacaaagttcatcagaaaaaaactaaagtgatctactaacaagaaaacactctatgttagatctcgtaccgtggaagaactgcgcgagagacaagttcgatatcgcggattttgagaccagcgaatgagatgaagatgaggatctggataccaagagattcggatacgaataggtaagagataatgacgaatggtaacgagagaaggaggattagtccacgtaaaaggcttccagcttcaacagcgacgagcatgaagtaagggaaggagcttcttgagagaagcagagtcccgtcaagatcggcggctatcgaatcgtactctccgtctctgcattccgttattggagggaagttttgactcttcttctccggagacattttcactcgctgtgtgtgtgtctctctctctcactctcgttaatggcagttctaaagaacagagagcaaaaataagaagacaagagagggaacgttatgttttaaatgcacctatattgaagaccgtaatattaattcagtgggttatatctataatctatatctatgtgaatgaatatgatatatatatatatatatgtatatgtcattaactatgaaatatccactaagagcgtaaagtgtagggccacatgtcgaattcattatatgaaaatgattatatgcatctatacatgtggtgatattgttgacacagtcgaattgtctataatctttttagagactttgtcttagatttgggtttaattatttagttgaagtgaagttgttagaaaagttttagatttaatgtagcttagatatcaactatatattggtttagttactaaaccaatatatagttgatattagattttaattgcattactgttgggaataatttaaatcttggagatgatattgaataaactctgttaaatttcttaacccatcaaaatagggaaaataataaaggatattctagaaagctttatgaaagatcagtgttagccaaaaccgacaagaaccggaccaatacgggccgtaacctcattctagaaacgatcttatcatttcaatagaggcggtggctcgagtcaaaatcccacgtggattagggtcaagaagacctctctataaaatgtaggactaattcgacacaaaggaaggaacaaaatcgaggacaaaaccgcaaaacacacgacttaattttaaaacacgactataatttatagattaacttgttatgccttgatttttgtattttgcaatcgatattttgaccaataaaaaaattatattcgattatttttatatttttttttgtagaatgtcacaaattgattacttttgtcaaaataattagttagtgtaaaaatatatatgaccacaacaacaacaaaaattcttcgttgtgcaagttaggttgatcttgttctcactacttgagcagttgagcttaatttgtttatttgaccgttgggagttgcaccgctttgagccgcacatttatgctcattaaacatatttataaaaaaaacgcatgaaagtgtttgaccagagacaaagtgtattagaaattcactaggcttacacaaaaaggcatgttgagctgtattagaagacccttaacaggcctccatactagtcttgaagatgggccgaaattcactaggcttaaagatgcgccgatattcactagtcttaaagatggcaccacagatggctccgagacattgcataatcatgtagaacactgctctggtcagagacaatttccgagccaagaacagaccaaatgttacgaagaatggattatataatacagtacagtatatggttttgccttcttatatatgtccacatcatttaaaatcttaaaccaaaattgaataatttaaataactcataaaacttttatatgtatgcttgtcttacattcaaaatgcgcattatcactagtttaatatttctataactgatcagtttttaattggttgacaccaaatgaagtggtcactgacgctataggattctattgggctgcatattaaagtttttttaagaattggaacttttaatattatctagggttgaaggaactaaaacgcctgtcctactgatgtaaggctagccctaacctacatgtatctcaagcgtccaaatttacgttaatacaattttcaaagcattgtttttcctctccttggagaaagtacatgcaaaatcaaaattaatggctccgacttttcgaatcaccgcaagctactatctcttcgagttctggttataatagtacttgattagatacttcttataaggcttaaaagccaacttaaatgctattgcagtaaagatttcattccttcttcacttcactttacgaatctaaaggatatatttagttcttcttcacttcaactaaaaggctaaactcccaaaaaaatatttttatctctctcaaaacttgaaatatggtgaggaagactactcaagctacatctcacaaggtatcgacaatattttatttttattattgcatgaagatttgttttgtcaatgcatgaagatcccaaaacttgaaatatggtgttttatttttatcattacatgaagattcgttttttatcattgcatctcacaaggtatcgacaatgttttatttttatcttagtctttgtttggttttatgtgtgtagtgaaaaccacgttaattgactcatacgctgcacaatgttggaagtgtcttaaagtgagatctatagagtcacaagaagattatgaagagattcgtagtaaaacactggaaaagttttttgaatgcaagagatgtgaagaacctggagatatggtaatgaactttgattcccttactatgcgttggtttcaggatgaacatagtatacccaaaacccctcaaggtttgaagagagttttggtcgtgagaacaaactgcgtgaaagtcgatgtttactatgaatcattggctcctagacgaaagaggtttaaatctataaaggaagttgcaacgtttattgaagacaaggaagaatttaaagacatgacgcttgaagaggtttcttttgccgcacccaaacggctgaaactaaaaaagaaacctgtcgatagtcattctagctcaaggaacactgaggaagatggtgtctcgagagatgcttagttttgtctgctatcacttatcaggatcattcatcgcttctctttatctcttctcttttgaacttttggtttttgtctttgatttcttttggtttttgtcgttgaacatttgatgctttatgttttcccagtttaagcaatttatttcctcttttatcatatcttttatcatgtacttgagtaatctgcctagtaatctccttctctctgaacaaactgctacctaaattactagcagcaaactttgaatcatacacgcttcttagaattcaaagcttctgaaagtccatctttgaacaactcaacctttgatttatctttgcacttctgatattttgacagtcttagaccattctggtagctttccttgtagctatctcacactaactgatacagtgacgttcttgaggcccttttaacacaatgatttaatcaaccttgagatctttgcaaatcatagcttttgatcattctctgaaattccttctctttgaagcaacaatatcgaaggtctctttctccttgtgatagcaacagattcataaatacttcaatatgcgaatccttctctttaagaacgagctatgagaagactgattcttcaccactaacttgtgttttacgtttcttcaacaaacttaattacaggttctttcatattaataactcttcatgataaaccaagttctgaagatgccaacgtagagatcagtctcagactccattactcaaatgccttgtagtttcaagccaatgctgacattcatgtctctttgcctttcatgtcactaaaaactcttcgttccataagactctgtatcaactgttctgaagggtcatcagtaagctatgttcccggactccaaattgagtgtccttataccagaatcttgtctcacatgtctagaatatctctgacaaaattcatcccattcagaactcatttggtcatccgtgtgatgtttccaccgaaactggtcaaaactgaaacttcagatgaattgtgcccggatcaggttgaagaatctcaaataacacacaaaccaaccgtcaaaatctcaatcccaccgttgaaaatcaagacagaaaagcttgccacaaagtttcggctcgatcagattacatttcaccaaccaaacgtttccttgaattagacatttcagaactggttcatatctcctctttcttctcttctcccccatggttgcactttgttaatctctttcatcacacaacattctttatgtgaccaacaagatcatcttttccttaaaaatgtgctctccaagctagcctttaagattctattttacagtttcttgtcttaaggcaactaaaattctgcctgtgagacaatctctaagagatctataatctacataaccttaatcttgttatttgcaccggaatctcagacttaaagtttctcagaagaaataagatgatgatgtttatcgcccttgctagaatcaccggagtaaccaaagcaccacatagcatatgaaaaattcccaactgtttagctatgtggtaagatgaaaattttcgatgtggtataaaggcagcttaggttaagacagcttcgaggcactagtagtagatttttatgtgttataaaggcagactcattacaaattttgtttactcagaatagatatcaaacttatgaaacctatcaaaatgctaattttcattgaagatggcatgagccaaacgaaggttggcaatagctaaggtcaaaccaacaaaagtttgcgacttgcgtatatagttatatcaaaggaaagttgacgcgagatatagtcaaagtatcaaaatagacatttgcatagatagacaaaaaataacgcaggttaaaggtacacatgaaaatagtctcataaaagatgagtattttgtgaccttttgagcatcctaggtagagcttatatcaaaagctaatccttaaggccgataaacataaacaaaagtaatcaccttaacagattctaactggcaaagatcattacacgggttcacctgttaccatcatcttcgatatcggtttactccgtcctttacgaccagaagctttctctgtttgaagggtataacccacattcttaagataccaaagtgctgcttctgctgcctgctcagctgcgattttcttcttgtactgtggattcccaaaacactccaaaaccgttatccgagaatcctccttcatttcaaccgtaactttgcctgtaaatctgaacaaaacaaaagaaaaacatgaatgatgctgacactaaagatttctaacctttaaaatgtgaaaagagtgcagaaattatgtgctcttacattttcatatggcaaggaccctcggcgatatactcatacagtggtgctttccaatgcctcacactacataaattatacaactgtgatttggctgaagatctctgagtttcttctaaacaacatgcatgtgaacaacagaacaaaatgtcaaattgtcgataaatgaaaactaaccccaaaaaaatgagacataattgacaagttttaagcttttgatttttaaggaatccaaaagctcttcaagaaagcaaacacaggtacacaatactaacattcttattccataaccatagctttcatctttaaaacccttataaccaataacattaacaaaaccttagctaaatacaactgataacaccaaaattaagtaaacagtgtggggagaaaaagagtaagtaccttcagtagtgggctcagttgtgtgaggcctcaaatctgcttctggttcggaaacaagagtgttctcaagtgtaaagtttggctccatctgcgtgacattgtcttcttcgacagtatcgttcagcttccttatcttaaacttactttcgcatctctgtagcaacatcctcttttgagcctgaatagagacaaagaaaaaataataataataactgatccaatccaacaaaaattaacaaaaagacatgacaaaatgattatttcttctcatttaagaagatctaagcccaaaaggaaagactaatatttctatttatattccgcatttcttaccacagagaaggaagatatgggatttgatgaagactctggaggaggaagatccatcgttgatttcaagcagaaaattcttttttttctttattggattaattagcttcagctaccttattcctttataataagaaaccaacacaaatcagacagactttaactacaacaaaaagtgtttcaaagacattgcatatatatagactagttaatgatcacctagatcaaaatccagaagcatagtgctattattagtaaaaacgttacccatcaaaaccacatatgacccatgacataatctatacatacaaagaattcaataataacaacaactttcaggaccacgacgcataatcactcttaattcaataatattgtctcagttgcctgaacatttgctaagaaacttataatttgacaaagctaggagattgtcgcagagactttttctgaaatcaaatttgaccgaacttttaacacaagagatttgttctgttttctatagagctaaagaatcagtatgaagtttaccaagtaaagctttaaacttaactaaataatctgctttccctttggtcaaaactcatactagttccagcttaaccatcttaaataaacatgtttaagcaggctatataaatgcacagttacagaaagaacagtggctattgcaatgaagtaaccaaaaaggaaaataaaaaggagagacagttatctaggagctcacagttatggcaagaagctgagcttttggattcctgctaccaatccgttttttaaatgcctttcacaacatcttttgcttgcctgcaaaacagcaaccgctttcagacaccacataggatcgtccaattagtataaacactgaaatatccttcttccaatcacaaagcataaatatttcccagcttctacaataaagccctatgaaagatgactaacttgagcaaaacagtaggccacaagtattcgaattggtcctagaaaacatggaaatatctaactatggtaaagaaacgaaatttgattatcttaactatcttaactatcttaactatcatatatctttcctctccttatctaaaaccctttgattagattacagaaacaacacttcagttcctaaacaacaatagacaaatatcttctttgcctaaacaacaagacagacccaaatatttagtagttaaacagcattttgctaaccacacaagacaattcaaatcacacacacaagacattttgctaattcatcacactcacttatactatggaaaagcaaaaccataagaacacacaattcaaatcattgtctcatatggcatcttacaacacaaaataagaaaccatcaaatatttattagttaaacagcagatacttttgagatctacataaagctataacttaccaaaatcaagtgacgtttaaacaacatataaatcttcataaactaagcaaatccttaaggaggagtttaccaataaaatcaaagagagctgaatagaagattgacccagaaaggagaacgatctaagtagaggctggagttttcgagttttgattttcctcttcacacttccgaaatctcaaattgagaacaaaagcttcaattttgaactaaacccagaaattctatttcaagcgagaatcggaaatggaaagagagacatgaatacctttaggaactgagctaacgccaatggagaagaagatcgagtgatgatgagatcgaaaagaagattgagaagaagagagtaacgaaagaagaagaagaagctcaagagattggttgaatgttttgttatttcactaaaaaagaaaaagtattatgaacagagcaatattgaaggaaaaaatattgaaggaaaaaaaaaaatttgtatttatgtattaattacaaaatattatttgatgagtttacatattaaattattacataatttcgaccataatgtaaatatgttttaaaaatgttataaactttataaataaaaaattaaaaaggaattataattaaagaactatcttttgaaatatttttttgaaagtaaaaataattattagcaataaatctacttaacatttttaaaatatatatttcctctttttattcgggtcagggttttatacaatttgatttagaaatcgtcaatcgaatatttccctatattatgacaaaacccaaaaacgaatttaatttataaaaaataattactatatctaaattttttatatatggtatattctttacaatttttgtagataaaaaattaaatatgatgatttaatgctaatataaaatgtttgggctaattttctaaaacctctctacctaataaacataaatacataattctcatttcacttttatttgattttatgtacttatattatttgaattattataaattatatatggttaataaatttcttgttttttctgcatatattatgattcaaattttttaaaacacataatactgaatcaaagaaatatatgcacaatctaaaatataaacaaataataaatcatttaaagttttttaaccgataaagaaaaatttggttatttattgtcaatcgggttataatagaatgatgcaataaaaaaaacaaaattatttgtaaaaaaaaacaaataatatcgaaaacaaacaaaataataacggagaaaaaatatcaaaaactaacccatattacaaacggtacagaatctacttatatatttttgcaacacttttatgaaataaatcctggagtttgaacttatttacaacccaatgccattggcattaaatgttttaacaaacttattatcaaatctataaatcgattttgttactaaaatttaggaaactaaaataaaaaaaaatcacaaaaattatttaaatcatctattgttcagtacacaacaagacctcaatcatataatgtgttaagcaacttttctgtggctctaagatccgaccactggtgctaaaacaagaatcagaagctacagaagaaacttgcatagctagaatatctctagctagtacaaataaaaccggaagcttaagactactgagcttctagtatgaaacacatcatattctgtttccaatgtattggcccttgtgttttcaacactttcttgcaagtacacaatagtcaagctcttcattcaccatcttgtcataaacagaggccaatccttcaacccccacattcacgaagtcatgatcatcttcataatcatgtctctcaaaaccaacccgagaacttgatgttgatacagaatgagggttgactatgtttattttatattcgtcgaacaaactattcaaaacatcaataaccggagcactaatcaccttagacttcagagaccctttgccataaagcatctgagacgagtataggaagaaaaaagaaacacatagtttttacatagacaaaagctgattagaaatcccaaatacatattcttgaaaggctcattacattgcaaaacacaagctacattagatagataagcaaagaaactactaaagaacaaattctggaccgtggaatctttctgtgtgtctctaactcttgctcttgaaaggaatcgctctgatgacaatctggtgatatagtgctgctagagctgctccaatgaatggtccaacccagaaaatccactgcaacaaccaccacaattttacaaattcaaatatattagaaaacatcataatacgttttgagttgtccttttcattagagttgtttactcacatggtcatcccaagagtggtccttgttgtagataattgcggctccaagacttctagctgggttgattccggtcccggtgatcggtattgttgccaagtgtaccaagaacactgcaaatccgattgggagcggcgccaaaatctacaatagagagtgaccaattattagtcataaactgttaaaccaataaaaccggggaaattcgatcggttagtagtctaattaaagcaataaaatcagcaaaccggaactaagagaggggtccataccgggacgtgtgagtcacgggcgcttctcttggcgtcggtggcggagaagacagtgtagacgagaacgaatgttccgatgatttcagcaccaaggccagaacctttggtgtagccatgagcaacggtgttagcaccaccaccgagagtctggtacggcgttggctggaaacctttgacgactccggcaccacagatggctccaagacattgcataatcatgtagaacactgctctggtcagagataacttccgagccaagaacagaccgaatgttacagcagggttgatgtgtccacctaaaaacacacaaacacaaacacatgttacacaaagatgtgagctttatctgagaaatcaacagtaaaattggtgtaacatacagatctagataagcccaagcatcaaaagaacccaaagtttcctgctttataactgtttttggttcctttacattttctaggtcaaacagagcatgaacaaaaacagaggactcacataatggttttcagaaacaaaacagagcaaataaagcagaaccaaaacagagaacccaccaaaacagagattacagaaaaatgggaaaatcgagagaaggttacctgaaattccagcagtacagtagacaagagcaaagatcatgccaccaaaagcccaagcgataccttggattccaacagaagcacacatgtttggtgctctcttaactcccattacagtcaaaacagtgatgtagagaaacaagaaagtagcgataaactcagctattccggctctgtagaaagaccatgagctgagctcgccgggctcgaacagtggcgcaggaggtggctctttgtagtccttgtcggtggactgagccgatgtaccgatgggttgcctctccgggaacttgttagctcccactcgtacatcttcttctttgccttccatttctctccctctccctcttttgttcttctctctccagaaaggttaaagttgtgagctttttctttctcgtgtgtagctaccaagtgtgtggtcgagacttcatttatagagaacaacgatagaatataataaaattgcctaacgtttccaaacatttatttttagttattgctaagaaaataaaatagtataacgtatagttttttctttatttcaaatttcaactagaataaccaatagttaacacctaatttcaaggcttaggcaaataaactgagagtcaaataaactgaaccaaatgtactaaacctaaatgaaaaaaaaaaacagaaccgaattgaatcaacaatttaaaaattgttgaatagatattaaattttataatcaaaataaccaaaaatgaattagtacctaactaaaatattttagatgatctaaaatatccaaaatataattttattttcaaaaatattagttatttctatacttagtaattaaaaatatttaaaaatatatattaaatagtaacaatattcaaaaaatatcaaaaaataattgaaatatttaaaaatattaaaagcaaaataatcgaatggatattaaatttcaaaaaaaaaaaaaaaaacgaaccaaaatttcaaaatagtcgaatgaatactaaactttaaaaccaaaaaaccgaataaccaaatagatacgaatcaaaaccaaatagataaccaaactaagagtttagaactaataatttcaatgatcatttgtgaatggtcttaaactttactagtcacgaaattcttttttctctttttatgttgacagatcaaactagtctagttacgtttttctcaactagttattattcatgatggtgaatgttgaataattatgttaatgttgaatagtttggtaatttgtactagggttactattaaataaagataatgatggaggagactagagagggttgttctggaacgtaccgatgtgctctcgtataaagacaaaaaacctgaccctttttttttcttttcctcttcccacagggtccactttctggacggtaaacaaaaatcgataaaattgtaagagcccaataaagcccaatagtaaaatagtaaaaaaaaaactgactattcaacgaaacaattatctgaccgttggagaaaaaattgacagctttatgtaaagtcattttcgttgggactgactatatagtataatgccgtgcttcataaaaatcatttttaacttttaattattcaaccatgcgatattccagaaaatgtaatgaaaaaagttgagggcaaacaaaagttataaaaatctgttttacgttgacaaaaaaacagtgttatgtactgatgaaagatacattctatcaaccagccacttgttatttttttttgttttttgcttagttagcttttttctgtgttgcttgaaattgacaagccacgcattacaaaatcaggtctctgatttttcttatatacaaatatttataatttgttgtggaccgaataaaaaaggctagcattgaatgcaagtaaataattttgtttttgaatatagtgactatatttgggtgctgacatgtaaaactgtttgaacagctcagagatgagtattgcttctctgtgatctcacatgcttcgttgccaacaaacactaaaattctcaaatgtaaatgtttccaattcgatattataatgtttagtaccatagttacagacttacagtattgtgcaaaagacataatttaggaaaagttcttacgtattcattttggaaacgtaaccacaatgcacagtcacataccgtccagccaacataagtttgacacgtggaagaacccgttgaacatgtgtattgttttattgggccggtcccgaccaaagccgcatacgtatgtctataatatgacattcatagactctgctcgcttcatacatgtttgaccaagacaaaaaaagaatgaattatagtgatgcattactaacaatgagtcttgacaagtattgattgctcgaaatatttaacatttatacgttattgtaataatttcacgtttttggtactcatttttaaacagtaactaatgatatgctacatgtggagaaatattagaaaagatatcagaatttggaaacgtgaatgttcgttgagtaataatgtaaacgaacaatatcatgtttgatttgtattcctgacagctcaatctttatcgtctctcaactattcatcaataattatcagcgactggttaagaaatactaatatctatagggcaacaaaaacatttgggcctgtaatttactattttcttttgttttaaaactgggtgttgacaaatattttttgagcccttaaaccaaatgtgttgttgaaaaatctggctcatttttagtgtctatttggaaaatatgtctcatgggccttgacccttccccttttgcctactttcataacctgattggtagatagtaactagtaaagttcggtctatttttaaaaagccttgtgcatgatctccaagtacgtatttcttgaatatggcgattacgatcgagtttggaatgagaggtaacagctttggagtgggcaatgatgttcttggttttcaaaaagtcatctttacatgatccgggaagtcaccgacaactgagaggtgtgtttccttcaattgactttgatgtttgaaggcatgcatagatggtaacatgtgttacgatataattgtcaaaataacatccttttttgtgatatgaggcgtgtattgatgtgtgtacttcaggttcgcttagaaaaaccattgagaatgatgtcaagactcttgtattctggttggataagacgtatgatatgatcattgcatgttttatcatataaagttttttaagaatagaaacaagggtctatgaatgtaaaaaaagttatacatagaacaaagtcagacactagattaattataggccattttttattttaaacccacacattaataatcgaatttataatgctaatcagaatatttagtgatatgtatctagtttgttaacaactctaagaaacttcgatatcggagattggagaccggggaagagagagtttatgacggaactttattaaatccaaaatgttgttacaaagcgaaatgtaatcatacttgagcttatatacttaaagattaaatgtgaacattgaaccaagatcaggttaaccaataagctgaagtaaccggtccatgtagtatatactcaataaactctacattgttttacttcattttcttctccatctctttgaactaccagactcttaagctataatttcagcagttaatgtggtttttagtttacggcatgagacgacaacttgcatcagcagcaagcaaggtctagcggctaaggtatcctaaagcaaagataacagcacatgtgcaaatgatttgcggagcaaaacctttctataattatttacattgaatttaagacaagtgtagctacctataaagtatgtagcattgctcggtactcttttgatcctttaaccttacatttacagtcacatagcacataagttgggagctctaaggacatcttcatccccaaagatatacatgtgggatgttggaagagagtgaaatcagaacagagcaccttaaagaagagagcagtaagcaagcaagacgaaatttcatactctctcatgcttgcttgataccaaaggttactacttatacatttcatactctctccaacaacaaggctttttgttcaattgttttaaacaggtaaaggctaaatccatcagcagggatttgaggcccattgtcggagagagtttaggcttgggaccaatttgttactatgcatatgggattttgttaaagcattgatatcaagaataaattagggtactaaaaattagtaactaaagtgaagtgacaggtttagaaaattcttaacccacatatatatttaattacgcccaacattatgattaaggctactataatgttgcttatccgtcaggtaaaacaactcatccattgccctttttcagcaatttttttttttttaatattggttagatttgcttttggcctaaaccttattttaagaaaaaaacaattacagtgaaagaagaaaattcatgtgttatcgtctttgagatttgtaaagcaatcaccaagattgtcctgtcaagttgcttaatgatgtattttaaccttttaaaagattaaagcttcgatggtttttgatgtgtaggtgaaacatcaagataaagtccattgacccaaactagttagtagttatggtagtcatgattctcaactactattattatcctacccattcctaaagttcaatagattttaactaagaaataattttaaaggttcaactgcaatatttaatatatttagcatgtatagtttttatttgtgataatttggatttatttttttaatatatcacttgcaaaaatgatttctatattttgcaataatatatcacaatattttgcaaggaccttataggtccgaatggagacgtgaagtttaattgcgaattaagtgcggtccggtttaaataataacgaaaatatatacttatacacaggtcggctcatattatttttggaccttgtgctcaaatttttgttttcagaaaatttaaagtgttagttacaaacttttaaaattttggacccttattgcaaaaatatcaaaaaatttagatcttaaaaccttgttaaaattagaaaaaaatggtggatccagtgctttagcactgcctctaagccgagcctgcttatacatatatgcagagaattttgcactatttgaaacgcaccgcattgtacagttcggtcaccattaaattgtaaatgatataaattgtgataataatacggtttagatgcttagaaactccacgttaagggaaaaattgcttacagtgtcactaacttcgtcagtggtttgtacccaaaaaaaaaaacaattcctcagtgggagagagtttatgtcgtcaatatctatttgtcggtcgataagtgccaacctcaaaaaacaatgacacgtttgtatcaatttctgaatcttaatttatactataaaatagtgtatacgtttgtacgcgtgctattgatagataagtggtaactatgtgtgttttgtgtatgtaaatgtataactatggtcccgtccctgactgaattaagttgcttaaagaaaactcaactcaagtaactgagcatggtcaagatctattcgattaaattttgatatatataccaaatggtttcgacttttgctaattgctatgccacatgaatcagacaatgctagctaattatttctgttgtaccataaagtgcttggctttatcagtaaaccccacataacaacattttgcttaacggaaactttaagtacgagttctaacattcaattatgctctgtttgattagattcaaacaaataaatagtttcttgatattgtaaagttctatttgtgtatttaatatcatatataagttttttttgcgattcaaactcgagttaagatagagacgattgacgtgacgttacaatatatgcacacgagtcacaacaaaatattatatctataatcgacggttgaaacaagaactctagctaatgttttggttacactcggttttcggacatggtttagaaaagcacaactcttccttaagagaatgacaaaacgtcgtcgttaactttagattaatgacttggtcaatgaaaacaatcgcatttggtgtaataatctcaaatactacgtgttctccatattccataaccagccaagcaaaagcaccaatgaccaattacgtctctcctctttggccgcgcccactcaattcttataatttatctatttgcaccctctttctctaaaaagttacaatttgacccctatagtttcactttcacttattcttataatttatctatttgcacctttttcctctaaacgttacaatttgacccctatattttcacttttattcatacaagcccattttgtttttctctctgctttcatgctcgcagacaacaatcctcgtcactgccatgtctcaaattcagagctttgagagatcaattatttaccggtgaggctaatgatgaaggctgttgaaaaaatctctgcaaaatacttttcttccatgtaaagcttctaactttttctctctctctctctctctctcctctgttgtttctgtagagaggaatagaagatgatgggcccattttccaactgtgattgttctctttatatttctttctcctgtggaggctagcaaaggccacgacgttgtggttgtcaaattggcataaagttttccacttttttactctgattttttctcccatttctctctcactttttctttgcctttgcccaattcagagaactaatggctttgtcggtcatcgatagataaacaaaatttaatctttatctctctctttctcttgtttgtcaaaagatgcccaccaacacagaaatgaggaaaaaaagatctcttttttatttgaatgttgaacagtaagaagaaggtttattctattctattgggttgggttgttcatcaactttggaaatttaaagatgcattttttatgatccttttttctccgcctttgttgttgatttgatcgtgtatgattacggaagcttgggggggtttttatcagacagaacctggaaaagttgtcagatgaaacaatgtggcttggagattggatcatcaacttttcctctgttttcaactttataagctatcattttgcttaatcttcttcattctcttctctcggccttggctttgaagaaatctcaattttcttcttcttcttcttctaccgttttgtccggcgatcagagctggttcaggagaaaccttaagtcttggtatcaaaagaaagaaagttttggaatttacctctgctgctgcaacttgcaacactttttttatatatattggatttttctatggctttgctcaaacgtaagcaaagcagatgaaatctagctacaatcgctgttgcccttgtatgaagtttggaatttaaggaattcaggagaatctaagaggtactttcttgtactttcctcttctgtctttttccaatagggaaaggtatcttatttgctccattagtctgtatctctcaggctttgtgttctcttagttctccttaatctttgccttattagttgaacaagtaagcaaattataaaaggagtttgctttagggaactggtagaggatcctttacttcttacttgttatcttaatttatttctcaagaattccattgcagtgtttaggaaggctaattctttcttctctttttaagtactcctaagcgtggaaattttttggtcttgttctcttgttgtttgttactcaaggatctgagattgttgtccataagtagaatttaccggagttgtaatttctatatctgaaactcattattgtaccgttgtgtgtggtgtgtcttatagtttgctgcttaatagttttcttgttcttcttcagcatttctaaaggggcaacgttatagaaggttaggaaggagcatttgtatagaaagtcatggcgaagaaaacacaacgtcgtgctgctgctcgacaggagagggaacagttagggtgcatgtggggatttatgaatatgtttagtttccgccatggaccactggctcacaagctgcttctcgaccaaaagcatggtaacaaccttctcaagtctctggcatctttggttttgcattaatcgtgaaagacttcttttggctgatagttatgttgattgttccagcttctggaaatcctaagaacaatgagcttaacaagtccaaattccgcgaaaaggatgctcaagaaacccatgtaagcttttaaacttattgggaacatccttaactctttttctattgtcttaagagtctcctgtggattaattccttgaactgtttaaaggttggtgaagaacgcaatatcacgataacgattataaagccaagtgtgaagaagcttatagcagaagagttgtccattgacaaggaaatcaagaagcagagggagaatgctgaagcaggacagttgtcagactctgaacttgaaggaagaagaaggaaaaaccagaggagaaaaaacaagactcgcaagaaaagctgcgataattttagccatatgaacttagttgacagtgaagagcctctagttcaacgcagaaatcgtaggtctgcaaggagtgttgacattgataatatgattgaagagttctattctgaaattcatcgcagaagtacaagccatgcaaagaatgacgaagattacaaagaaaaactgagggagttggtcaagtttttaatcagtcagaagcttttacatgggaaccgtcccagaggaaatagtgaaatacttacatctaaggatttgatggaagtgtttcaaattctgggatcagatgaagaattgtttctcaaacttctgcaagatccagagatacttgtgcctagggagaaaggagcagaaagcttgagtttggttgagtcagaacaatcttctcttgctgataagaaatggtctagctttttcaggagaaaagatgaaccacaagaagaatgtgaagcttcagataggattttcattctgaagccaagatcagctagcttttcaagtccggacataggaaatagtcgtggttcgtcacctgattctcatttgatgggaaacaaattgcagaacgagagaaacagttcacattactttctttctgagatcaagaggaaactaaaacatgcaatcaaaaaggagcaaccggccgggggatttggggaagggtttccgaaaactaaagatcatttctttctcgagcggatggcgaagccttcaacatctcagaagaaatctcatagtgaagatgataaaaagcaaagggtatccaacatttacacagaggccaagaaacatctgtctgagatgttaaacaatggagatcttgattcgaagtcaacgagcagacaggtccaaagaagcctagggagaattctctcctttcctgagtacttgtctcctctaaacagcccaggaagaagatgggaaaagagctcaactgctcacaagaagtctgcttcagcggatttcataaatcttgtgaacatcaagaaagaaactcatgcgagccaaccagaggaaaatactgatattcaggtctgcaatctaagcaaagaacctgatgattctatccaaccaatcgcaagtgaacctaatgagaaaagtgttgacattgaggatgaaactgctaacgaagataacatgttttctgcaggtaataatatttctgtctcatagtaaggctctctgttttgagtaacaataatttattttataacctttcttccaggttctgcagatgatgtgatgattcccaatgagctagatgaagttccagaggaagcaagctctacattgattggtgacttatcaaaagttgaagctcaggatgaacagagagatagtataaactcgaaacaggcaagtcattttgattgacccctagaacattaccttttttgtatggactttaaaatgaggaaatggtggaagacttaaattggttttgctgcttctttttttctacagacctctcttgaagagagccaaccaccactgtcttcctctgtggcctcaccatcccactgtttagctcaaactgaggagtgcaaatcagctattactgattttccggagtggtcaagcccaatatcagttcttgagccactcttcgtcgaagatgatataagcccagcaaaaatgcgatctcagtctggtatgtagaaaaagatcccaacatctactactagacttggattctagtacttagttcttcaatattgactcatttttacaactcaggtgaagcagaggtgcaaccgtggtgtatccacttcgatgaaaaagatcctgcacctacataccgagaaaattctgtgacaagtgacaaagaattggtgtttaagtatgtaaaagctgtcttggacgcagtagactcagacatcgaagagctctatctaaaggcgcaattctctgaccagcttcttgaaccagcacttatcagcaatataccattctgtccaaaccagctttgtcctgaccatgagctcctctttgactgcatcaatgaagctctcatggagttatgctgttgcccaccttgggcttcgtttgttacaccaagaaccagagtcttctctaccgtcaaaagcatcatccatgaggttcaagaagcggtttactggcatctcttgccattgccactccctcacgccttggatcagatagttagaaaagatatggctagagctggaaactggttagacatcagatgtgacattgactgcattggcttcgaaactagtgaactgattctcaacgagttactcgaagagctcatcctcaacaatactgagcactctctggtttcacctgagttgaagacggatgggagcatccttattctagaaaggtcttgaaagctgaaaactcttttcttaaagacaaagccattgttgatacactctgaacatagtctcactgtcaccattgctaattttttttagcacagaaccatgtagatagtttgtattactcagtcagacaaaaacctcacggagctcctgtctgatcagaaactactgagagggagaaggaggaaatcagatcctttcaaagaccagaccagaaactgttagtggtggggtcatcagagaatcactttcaaagacagtcttcttcctataggctattatatagtatatgatttattattttattttagagtgtttgtgtgaagatggagggatgtgatagtgtttgtttgaaatcggtttgtgtaacattttcagagtttgacataacaatgtattatggattaggagtatgacaaattcaaagtttttgttgttcatgaaaacaaaaagatataaattgggtatgttgattactagacatgaaactagaaagttttgttaataaaacctaggaagagtgttgtaaattgtagtctaacaatggtgggttgataacaggacaggataaatatcaatggagttttttttaagtaataggaaagaagcagtcataacacaaatctgtagagatttttactcaatggagaaatgaattttatggatcatgatatatgtatataaagttttggataatgtttttgtagttgttgcactttatgccctacttagtgaataacattttctttgatgggatatggttatgtggacacaatggacagtacacctgataaagatggattttaagaaattaacaaaactgaatgaattatatacaaactgataaataataaagggtttattctttttaatataaatatatttattttaatagttagtaaaattatttcattttgtttttgtaaaaattatgtataacacttatatataaaagatgtataatgcaaacaatcaacatgtcacttatatgttcttgttttagtattgatcctttggttacattattatgtgatatacaagcttattctatatgccattataaatgcttcttggggggatgcttgtaccatttagtgagtcaatctccgatctaatataacgaactgaacgataaaaataattattatcctttaaattatagtcgttgctatttaatatttcttaccttcattttcttattatctcacgttctttgatttgaataataaaaagcgaatgaaagtaatagataatattaaataataacggtaatttaaatacaaaaccaattttttattttatttttattttaacatgattctaaatactgatgaaaaaaacatgaatctaaaatactttcaactataaaatcaagagaatcaactctctctcaagtgctcacaagatcaacacaattaccaacctgcaaacaacacaaacacagtagcattctcaagctctggaacattaggcaaaggtctctctgctacacgagggtgtcgaccgaccctttagcaaaagagataagggctttgaaatggtagacgaagagttgctcaattgcctatcaagtgacactacatatcaaagtgaaaatatattacaaacgtccaaaatattacatatttggaggcttagtttttgtgcctttcaaaaaggcttacattgacaatattggtgatgagctatgtgcgtgtgctctcttatgtacaactaaaattgaggcaaaggaattagaggctaaagagttggtcatgctttctagggtatgttattttttttaccttaaagcgttttaatggttttctttttttgacactatacattgttaatctaaaaataatttccgttttttgatgtaggtattgagacatgacaccaaccgttattacgaacatttggaacatcttcaggtaactcttctatgttgtacttgtttttgagcctttaaccaaactctttttttgttttcttttcgcacccaaaaaataaaccttcttttagtgtttgagaagaaatgataaaaagaatgaatacaaaataataacgatcttaatttaaatagaacacgacaaattaattttaacataagtataaactatactttcaactatgaaaacaaaaaacatattcgacattaatttctgttataaacagtttttaaaccattcaaattttgattttgtattagtgttgtttttttgttaccataaaaattcaatctcgcatattacatgttggcgatatattaatttacaatcctttgctaaaaacaaaaaaatttaccattaaaaatatattcagctttattataataaaatgaatgaaagtaataaataataacgatcgtaattaaatagaagacgacaattttttttatttgtttaacatgaatctaaattatacttgagactatagaaacaaatagaatttatacaagaaaaatgtacttaccaaaaaaaaaaatatatatccaagaaaaatgttgaaacaattactacatactttgaagattgatctaagcaaatattgatcggatcatagtaatgaattcgaaatctaagaccatacaaaacatgccataggaagagctttaaaaatccaaaaagaataaaaatctgaaaaatcccaaaaaaggaaataaaaatggattcacaagacgaaacccttgttgcatagcatagcatccaccatcatgtcaaaactagtctaataaataaaatactattttacccatttagcccctaggagcttaggcaagagaacgcaaggacagaatcggaaatataaaccagaaaaggttaagattttcttaccagaacagtgtgtgttagatcgaaattcgatcgatcaatcgcaaaaaaaagagagtttgttgttgttgttgcttctctgcttctattcgattattcttcttctatttagtctttgtttggtgtttgttctcttccttcttcttctttcctcagagcacacgataactattttcacatcccaaactacggaatcacaaaaatctgcagataaaggaattgtttttacacagcagagagagagagcattcgttgtcctcattacaccaaaaaagtgcacaagagaagagattgaaaaagaaaagagtcaaactttaacaaagcccaagactcttctttgcttcttcttcttctgggccttgttatttattgcttcttcttcctctctgaatctctctcgcgctctagatttcccctttattggaaaaccctcaatttctataaagttccaagctttggttctgttttcgtttaccaaatctctcccttgattcgtcgaatctcgtggttcttcgagtttctctcatcagggtcgaggtcgaattcgcggaatttcctgtcaaaaccctaactttgattcgactccggattgtggggtcatctcgagctcctattggttagttttcgatttgaaaccctagcttttatttattttatcgtacggattaatatttgtttgcgtagttcgatttggtatatttgatgatcatggtgattgttttctagctcagaaaaggatttagttttagcagatttttgtttgcttctatctggatttgttcttctctggtatgtatgtagcttgacgcagtgtgttttcaactgggaataaatacttccttcttcgataaagcatctaactttaattcagattctgttttgtgtatagaaatattgttcatgatgattatttgtatgtactagaattgtacttccacgctttcatgttttctagtttggttgcttgattagggttggcttatatttactcaagatacttatcatgcaaagctcagaatttcactttaagtgatgtatgttatagataaagtttcaggctaaatatttgaagagaatgtggaacgtattaggcgatttgaactatatgactgttagagtaagcgtaatgagctcttttgagcagctgatctgtgatatgattacagacaactaaatttcataggaatatatgagaattaaagccgagtttcaaaacttctattgcacacacaatattgagactatatgtaactttagtgttttcttcttcttattcagtgtaaattcaacaccaggggtacttttatgtttcagggtttacttccatcaatggggttgcgctgtcgccagtgctaagttttatgctgtaaggagatattgaaaataaaagtggaagtccatgaaaaagtttcttatggtgctagactgtggattggtgcttagagtttattgtggtatgttgatgtcagaaccagtatgctggatatagttgggagaaatgcaaaggtatcatgctgccaactgcactagtgcagtcaacaatagtgctataggtggtgcatccgcgagggactcaggacgagctgattcctcttcgattggaaactattcactaaactccaggcatgttgatagaaagaagtacttacatagttattttatatgttgatacatttgaagacgtttgaatactttctttactgcaggagaccaccaccgttgacaccctacaagttgaagtgtgaaaaggacggtctgaattcccggtaattcctctttcaccttatccctagtttaggtattcgataaacacaatatagatgattttaaattttgctgttttagatttgtagcttgggatttcattcttttatctccgataggctaagtccttggagtacttgttaatggatgaagttggcactcttttccatttttgatttacttccctagatgatttatactttttctctattgcagattagggccgcctgattttcatcctccaacatcaaattctcccgaagagaatctgaccaaagagtatgttcaatttggatacaaggaaactgttgatggacttaaggtgcgatcaactgaatttagcagctatgcttttaatttttttgtagtatcgtagttaattatcattgacatgtttgcaattaaaataaatatcttagatcttattttggaccatgcctatagtattttcctatagatgctcagcagtaaaataagaatagtttcttactgaggctgaatgttcattgtagcttgataggttgtaatgatgatttcttcaatgtagtcatataagatgcttacaactcagaaagtctacattattataagtttcatcttttccgatgttagagtttttaattccttattccactagttttcgcgcattatcttgtaattgaggttctgaacctttggcctttacaggaatccgaagaaattatattgtcccaggtccatactttctcaaagcctgttgtccataagtgcaaagaggtacggtactagaaattatagacaatgttgtctcccttatttgtgatctctattggagttcatttgtgtttcacatgaagttaaattcaatttctatcccgcaggcagtcagaaagtgtcttagagctatcaatgaatctcgtgcactgaagcgcaaggtaatcaagagactctcagactccaatccttttcaatttatcttttgtgcagagttcagggtttcggtcccaatcatattgcttataattcataatctccctattcaattaactggcaggctggtcaggtttatggggtgcctctctctggttcgcttctatgtaagcctggatttccagaacaaaggtcatgtggggaggagacaaagaaaagatggatcgaggtacctggccttttattatgcttatctaaacttcttaacaattctcctctgatccatgtttgttgctgactcgtggcataactgccatatattcttaaagaagaatacttaactcattcttgctctcattttttcacagagtttatcacaacagcacaaacgattgcgctctttggctgataacattcctggatataggagaaaaaccttatttgaagtccttataaggaacaatgtcccactattgagagctacttggtttataaaagtgacttatctcaatcaggtacattgttgggcaataaattggtatctctaattgatttctctaggtgttggaggatatcaagttttgcttataatttgcaggtgcgacctagtcctgctgctatttcttcaggaacacctgacaagacacaagcttctcggtgtgagcaatggacaaaagatgttattgaatatttgcaatacctcttggatgaacttttgtcacggaatagctcatttcctgctcagcaaactagagataggtcaccacagatgctttatacaggatcaatgcaaaagaatagtccagcatcaacaagcctttacggcgaggaaacatctctacattttaaatggtggtatatggtgcgtcttctacagtggcaccatgctgaagggcttctttttcctaatctcattgttgattgggttctcaagctcttacaggtatgctgttagattaattgacttattcaagatgaattttcatttcttcagctttgtgaatttccattttgctttactgcaggaaaaggagatctttgaaattttgcagctgctactccccattgtgtatggtgttttagagagtattgttctctctcagacatatgtacagagtcttgtagctattgctgtccgtttcattcaggaacctgctcctggtggatctgatcttgttgataactctcgaagagcttatactctatctgctctaattgagatggttcgctacttggtacttgctgcacccgacacatttgttgcttcagatttctttcctcttcctccttccgtagcagcatgtggacctaatgatgtgagctatacgtcaaaggcttatgagaatctggaaaagctgagaagtaactctgcggagatttctgcccagtttcaaggaagaggagttctttcccggtttgagttcctttcttttgattataccatttcaaccattcaaagaagtgcagatgatttggcaaagatagctagcgctggttaccctcaacataacgtggctaaagctgttcaggccttggataaagctttgtcggatggagatatcagagctgcttacagttatctctttgaagacctttgcaatggagccgttgatgaggcctggattactgacgtcagtccatgtttaagatcatcccttagatggattggcgctattagcacatcctttgtttgctccgtttttttccttatagaatgggctacatgtgattttagagatttccgtgctggtgtgcctaaagatatcaagttctctggcagaaaagattgttctcaggtgtatttagtcattcagcttctgaagcaaaagattctgggtggagaattcacagctcgcaaaggaaagaattgtcgcaacaattttcttggtgtttctaaacctagcggttcgatggatgcatttgaaagcccgggcccattacatgatatcatagtctgttggattgatcagcatgaggtacacaagggaggagcaaagcgcttgcaattactcgtttttgaacttatacgttctggaatctttaatcccatagcatatgtgaggcaactcatagttagcgggatgatcgatgtgattcaacctgctgttgatcctgaaaggagaatgaggcaccatcgcatattgaaacagctacctgggtgttttgtacatgaaaccttagaggaagctcaactctttggaggggataagctttccgaggctgtgagaacttattctaatgaacggcgccttcttcttcgagaactgcttgttgagaaaggtaaatactggaataatttagttctctcagatcagaagtcaaagaaaatttccacttccctttcgtctgttatttttccaagggcgtgtaatgccaagagcaatagtaagggacctcgcaaacataccaagagtagtgtggatattagagaactaaaggagcgcatatcagctctactgcagtttccaggtatgtcatgtggtgtggaaaccccagtgcgagatgaattccaaaatagtgttaagagatcaagtggatctgtgtatagcaagatggatcaaccagaagctacaccagggtgtgaagactgtagaagagcaaaaagaccaaaaatgaatgatgaaaagagctcttgctatcaagggaattcaccaattgcatcagatgaagaagataactggtggatcaagaaaggatcgaaaactgtggagtcttctctgaaggttgatcctcagatagagataactaaacaagtaccacgaggtaggcagaagatggcgcgtaagacacagtcgctggctcaactacaagctgctagaattgaaggtagccagggcgcttcaacgagtcatgtttgtgataataaagtaagctgtcctcatcatggccctggagtggaaggagaaaatcagaaggtggttgatgtgtttagaacttccacccctgtggatatggtatctgttggaaactctttgaagcagctacagtttgttgataagcgatctattgcagtttggcttactactgcagttcggcaacttgttgaagagccccaaaagagcagtgtgagagttgggcagttcaatagaggtgctccagttgaggagaagaacacaattaggtggaagcttggggcagacgagctatactccatattatttctcttggatatctctcttgacttggtttcagcggttaaatttcttctttggttattgccgaaggccaacagtaccccaagttttgccgtacagggtggaagaaaccttgtaactgtaccaaggaatgttgaaaacaacatgtgtgaaataggcgaggcgattctagtatcatcactgagaaggtggtttttacttccttcaataagtaaacactattcatatatatttttgattgtatttctagaaatttaatcggtttgtatcattaatttctttcaggtatgaaaacattctactttcagctgatcttgttcctgaggccatgacagctttgatgaaccgtgctgcatcacttatgtctagtaatggaaaaatttctggatcagcagccttagtttatactcgctatattttgaaaagatatggaagcctccccagtgttgtggaatggcataacaatttcaaagcaacatccgaaaagaagctactttctgaactagatcatacgcgatcaggaaatggtgagtatgggaaccccctcggggttccagcaggagtagataatccagatgactatttacgtaaaaaaatcagcattggcggtgcacgtccttcaagagtgggtttgagtatgcgagatgttttgcaacgacatgttgaagaggcgactcattatctcaaaaaactcattgggactggtactatgaaagcctctctcgctgagaaaaatgatgacgggtatcaggtggctcaacaaattgtagttggactaatggactgcattagacagactggcggtgcagctcaagagggtgatccctctttggtttcttctgcggtttctgcgattataaacagtgtaggcctttcagtggcaaggattacagatttctctttgggaaacatttatcagaatcatccttctggcgttgattcatctaatattgcacgatacattttacgaatccatataacctgtctgtgccttcttaaggaagctcttggagagcgtcaaagccgagtgtttgaaatagcacttgcaacagaaagttccactgcgcttactggagtttttgctcctgtgaagggatcacgaggtcagcatcagctatctcctgaatcctatgattcaaatgcaaacaattcaacaatcgatatgtcgaatggtactggaaaaatggcgctgagcagagcgacaaaaattactgcagctgtatctgcacttgttataggttctatcacacatggtgttataacccttgagaggattgttggtctactgagactaaaggattacttagatttcgttcagtttgtaaggcgtacaaaatcgagttctaatggcagtgctagatccatgggagcctctaaagtggaaagccctattgaagtgtatgtacattggttcagactccttgttggtaactgtaaaactgtttcggaagggctggttttggagcttgtgggagaatcttccgtggtggctatatcacgcatgcagcgtatgcttccgctgaaattggtcttcccaccagcctattcaattattgcgtttgttctgtggaggccttttgtttcaaatagtaactctaactccagcgtccatgaagacactcaccgcctttatcagtctttgacaatggccttccatgatgttattaagcatcttcctttccgagacgtgtgcttcagagacacccagggactttatgaactgatagttgctgattccacagatgctgaatttgcgtcggtgtttgaatcgcatggattggatatgcacttgaaatctgtggcctttgctcctcttcgagcgcgtcttttcttaaattccctaattgattgtaaggtgccatcctctggttattcccatgaaggagttagtgaagcaaaaaaccgacatcagggaaatggaacaaagcttgtggacaagcttgtatctgtattagattgcctgcagcctgcaaaatttcactggcagtgggttgaactcaggctgcttctaaacgagcaagcacttgctgagaaactcgaaaatcatgatatgcctttgacagatgcaatacgatcttcctgtcctacctctgagaagcctgatgcctctgagaatgagaaaaatttcattcaaatcctcctcacaaggttattggttagacctgatgcggtccctcttttctcagaagtggttcatctcttcggtagatcggttgaggattcaatgttgaagcaagctgaatggtttctagcaggccaagatgttctttttggacgaaaaacaatcagacaaaaactgattattgtaggtgaaagcaaaggactccccacgaaacctcagttttggaaaccttggggttggtgcaacagctctagttccgatcatattacagcaaacaaggcagggaagaaaaggaagtttgaaattacttctatcgaagaaggggaagtgattgaggaaggttcaggttcaagaaaggtattattaccccgggtattggatgagaatagtcccagtgttggctatgggattacaactgagagggcttttgttcagctagtgcttccatgcatagaccaaagctctgatgagtctcgaagtacctttgtgaatgagttggtaagacagtttagcaatattgagcagcaattaagttcagttaccaaccgcagtacaacaagcaacaagcaaatgggaactgcttcttctgggtctgagatttcatcaaataaaggaagtacccggaagggccttcgcggtggtagccctagtttggcaagaagatcctcagccaatactactgacacttcgccgccgccttcccctgctgctttgagagcttctatgtctttgcggttgcaatttcttctaagattactgcctgtcatctgcgggtactgattctcttccatcttctttttccccattccgtttagcaggatttgttgaaaagtcaaatgaaatggctcttccatgcagtattatcgaatgaaactattaaagcctgagttatctttttgtatggcaatttatttttcagggaaccttcatttaagaacaccagacatgcacttgcgtctacaatagttcgtctacttggaagcagagtagtttatgaagattatgctgtatgttctcctcgtagtgagctatcaaaggcagaaacagaatcaacaatagatccttcttccatggcagatctctctagtgaagtcttatttgaccggttactgtttgtactccatgggctgttaagcaatcaccagccaaaatggctaaagccaaggccttcctctaatgaatcatccaaagactttaccttgtttgatcgcgatgcagcagagagcttacaggtttgtcaacaaattttaaaaaatccttaaaagtctgtcttcttggctgcaaagtacgattcttgaagtttttttgttttttttggttgtcaattaatgcagaatgagctttcgcggatgcagttaccagacaccattagatggcggatccaagcagcgatgccaatcctccttccttctctacgctgttctctctcatgccagcctcattctgttccgccaaccgcactcacacttgttcagccctctggatctactgctgctgctggaaccaatcaaagaaactcccctgccatatcgaaaagtggaactgcagcagcacaagggaagctgaagccgacaatgttggcaccacatcaacaacaagaagcagacaacacggatgtggttgacccgtggacgctcctcgaagatgggacaagttcaggtctatcaagcagcaacgcttcaaatagcagcgacatggccaaccttcgagccacctgttggctgaaaggtgcagtcagggtcagacggactgatctaacttacgttggttcagtagacgacgacagctgaattactctactgtttcatagttttttgatgatcatgagagctctggaaaagaaaggagcaaaaagcttggatcttcgggtgccttagactgtactatcatttattgaggggctcatgaagaagcaagtcgtaatgaaagatctccaatgagtctctgttgtggcttcttcagatctttgtattttaattactaaccctttttgcttttttggtcatatcccccggacccatactggttcggaaccctgttgtatatatagggaattcgaaattaattgtctcagtttcttgttccattattatttatccactaaattcactgttatcattcccctgaatttttatattgatgaacactttagtctctctttttgctcttagctatgtatatcttttcaaggatcttacatttgattttactttacaagagagggaaacagaaacatagaactcttgtcaaaagtctagtacgtacaactttattcactacctctcatggttttgtctacatagagaacatcatcaatccaagcaactatgttaaaagctaaaccttcaagtactcttgagtagctctccaacacagcttttccaacatcctgcaaaccaaaaagcacaacactttttaagtaattactatagtgtactatcaaattcaatgagacactctattcttcagtttttaccttattgtactgaatcttgcatatatctaatgatgtctgagacaattctggataacgctgtttcaaacagaagaggagagtctcagctctctcagccataacatagttcttgtctgttctctctgtagttgacataagatctttcaccatgttccatgagttcttggagttactaagacaagatttgcgtctccatgtgtacatcgaagcttctactctatctgctaactgaacagcttcatgttcggaagatatgttcagacaatctaagagttgctctgggaaaaaccgaccagaaccactcatgtaacggtaaattgaatctccaacactgcttttaccacactgcatgtagagattgtacatccataattagactcaaaacttcaaaattcctagtaggtatgaatgaatgaaggtaacaaaaaaaaaaacctttggaagagttgtcatgtaagagtctggaatctccatttcactgagaatgctactgttgatagccattgcagctttatgaatctgattggtactttctctcttgttcttgagttgttttctggctttatctgacaaaccttctgatggtactagaggaactggtaaccaccatttctcttctttcctttgtactataactttcctgaatgatccagtcgaagaacgagctgatttcatcgataaacttccttcttctgcataccaaaactctgtgttctgaaaactatccaatgcttcctgtaacaaacaaggatcaaaaacagatgtaaccatgtatgattcataatcagaccgagaatagtcatatacatttttcggataatatatgttaccataagcattgaatctagctttctcaatgcaggcaagttgatatagatatctgctcttggtctactctccatcacctgaacaactcaccaacaaagttttcatttttccaatttttgtctttcagttttcatacaaaatatttgacaagttacttacctcaacagtagctccattgcttagattctgacatctagggatgaattc

SEQ ID NO: 503 - DNA, 91149 bp, Arabidopsis thaliana
gttccggtgaagctaagctaactgggaagaagcggaagaacgtgagtgccaaacaatcaaagaaagatgcaaaaaaggagaattctcaaatgttaaagtggagttcgaaagatgaggtccttgtgctacaaggtatgttggatttcaaatctgtaacaggtaagaatcctgttgatgatataaacggagcatacgaattcgacaatgtaatcgcatacagataaaagacaattcatttctctcttccacaatgctctcttctctgtttctaacggctctaacctcagattctgtccaaacactgtagctgcaaacattatcaaatgaagtatcatttttacagttgtctaaaacaagagcataggctctatgtgaatgatgcttaatggctttaccataaagattggtaattgcgtttgagatagtcactgcagtgcaaactcctttaccactccctgacatatcttctccaagtagaagcttagcgaatctttccttcattgtctcaagttctgcacaaaccctagaacacatgagacatttaaaaaaagcagtagaagaaaacagagaagaaagaaagagagaaaactacagtacctggttcagaaatttcttggactacaagacattcatttgattgcatctctaaaccagagagacatttggagctcttagattcagtaaggacaggccagttacaaggagaagcttcactacagaagctgttggtttcatctatctggtctgaaaaccctgaagtggtctctgaacaagttcgagggtaaacaaaggaatctatgctcatcgtcgagtaaaccggagtttctactgctgattgatcattttggtcaatggatctaggtgattgatgatcgtcgttttcatctggattcgataaattctccatctttaaaatcttaaaacactccttaaaggtctgttttttttgttcttgctctgtttcttctgaagaaataacacaaaaaaaatgtagatatagcaaaaagctttggaattgtgataatcaagaaactttagaaatttgaaagcgggaggtttttggatagtgaaatttcttagttccaaagaacaataaagcaagaaagcagaaagcagaaaaaaagaaccataaaaatcagatcaaatgactataaaaatcgcaattttattgaaaatttcaccggaattcaaaaaaaaagtaagtaagtaacgatcaagaactaagagaaagtctgaaactttaaatttgaaaggaaaagaacgttaaagttaaaatcaaagcaacggtctttatttaatatcatacctttaaagcttcttcttgaatttgaaacgtacgtttaaagcaaaaaatttgaacgttaataaaaaaaccaaattccctccggttgaatcgaaatcgttctttaagccggcgaccggaaaatggagtaaatgtggaccgtccgatgaaaggaaggtagactgatcgtacgatccagacgatgaattgaagtgacttttccttggcttcaacaagtgtttttggttctatgagaaatcatacaaatacctctttaacacctatttgtctatttggctactatactttatcattttcttgttggcttaaaatatagactatagttttcaatcagaatttttcattttgattattggatccctccacacccacaaataaattattagctccaatgggaaattatacatatgtttagttattgatgattgcacattcgaccaatgatcaatttatatatattttcttttcacttttacgaatttagacatctaatgtaaatttagaattataatttgttgaaccccatatatgtattcaattatatgaaaatatctttgattgaagatgagatgtgggtgaatgttcaatgtatatatcatcccttgacctttatatttttaagaagtaatctttggtcggtctatagtaacacctccattgggaattttattttaattctatgtgtcaaccgtttattaaattagaccaattatcacatggttggagattggcttatccccatgtagcctacacgatgaaccgcaactcataataggttaatatttatattagtgtaatgtattatggtttcaatttgagttgtatagttataatttagtttagcacatgataagttaatgtaatggagaagacaagtatatatttgcatggttcgtgcgttagacagacgtgcgtcccattttctcgttgtacacgcattttacgcatttacttaatctatgggtcattattttagtgtactatggactatgatattatacaatattaataagtttcaacatatacacctttatttacttgttgagatatgttccatatacttatattttaaaaataaacttaatataagtatgtctaacatattcaacaaattttagttaatagaaagtgaactaaggagtatagacaatgcatacatataactaggtagcaaaaaattagtaattatatgggttgaaaaattaaatgaaagtaagaaaaatgttacatcaaaagatataaatgtagaccattcattacattaaaagattgaaggtgaaaaagattaaagtcatcaacagtttcgtattcttgcccatcacgataccgtgaaagggttgatcgagaaaccctagctacgaataaggagtaaggcatttcttatagtcgacgaaacaataaagtagttttgcattgatgagacattgccttcttgcccatgcagctataaacctaaaatgtttgcacaaacttagaaatcaaataaatgtcatcgctttccttgacaggcccgaaccatagaaaattattggaaacaaaatttaatagagttttgatgctaacccttttaatcattttagttctcttttagttgatattgttttgttttccgaaagcaatagagcagaaaccttagtaatgggagtttcatcagattctgaattggagaaatcattagttcttcactgtttttggcctccatcttcagctcccatgctttcctctgcaatttatcctacaaaaataaataaattttcttgagaaattttgagattatatgttattgtcgatgttcttgaatatttcaatgtgctcaaacaccaaaaagtactagtaaaaagatgaacctaagattaataagtctccacaaagattctcatgaaattctaggatagttaccgagttacttactgttgcaatgaatctcaatccgacttttagttcacctttaaaagtatcgtcctcaagaacaacattgtatggagctggttttatttcaatgtatcctctgtcacgcccttcggttattatgcctccgagatgaattctgtaccaaaaagagtcacaaacaaaaggatggtactatatgtgatattgctaatgctaaaccacattaacttcagtttctgcaagcaaaacttacatggtttcaccgacaaatccaccatcattgaagagctctttgtccaagattcttaatttgatataggtcagtttcttccattgagacatcgggaaatcgaaaacaaacttttggttccacaatgcattgtcattatcaccttttttcataaaagagccaaaaatgttttctaatatacatttggctaagaggaaaaacaaaattactaaagagtaacaaaacttgaaccttttgacattttgctacggtattcctttgtcccacattgtaagagcacataatacacaggagttcctacaaaccaaaatgattaaaaataacgattttagtttgatatataacatatatgaagaaggttttgtcttttcataatcaccgataaaatttgtgtgtgtgattccatgagcatcaatgagaaatacttccaatatccctctcttcatatgtgacatccaagaaaatcaaatactcaaaagactttaagaaattaagaagtagtgtatggtaattagcgtgaaggctgcatcaattggagatatataatgcaagtgaaacaatcaaattttataacgcaccataacatttactacttctttggaggctctatgagttacaagagaacaccattaattatgcattcaagaaagaatcaacagttttcaataaataccttttcaagttacattatcctccgtttagtaaatatcaatccgtttatttaaggatttagaaagaaactgaagcacagaatcacacatgacgacctaaacgaagcataatatcaagaggttgaggctacgagacaagtttagggcttttggcgagcgctagcttttctaatcaaacgggtttaatacggcccaaaagcccactaaacctaatagcctatgaggaccaaatcaattacttgaggtttaaggtacaacttattatgataatgtcggcagaaaaattgcattagtaactttaacaaatcccacatcggaaacatatggaaattttagctagtatataagacagatttagttcaagcattagtaaccaattggctttgaggtggataaagctcattagctttcccatgagatcatgatccttgacccaatagggttcattcaaattacaataggatatgtatatgatccatcctcttcacgggaaagaagttgagccaaagccaattggttatttttttctatcaatacaaataatataatagctcaaaacaatcattaatgaaagatacaaatcgcccatgaattatgaataagtatagatcttggttttgtagaagaggaagagacaacgttgtcgaaaattccaaccaaactttggcaaactttacatacaaaaaccctgaaaacttgatgtaaagataatggcacatcgcatatcggttcacgaaagtctagataaatataacatttcatcaaaagtttaagaaaatataagaatttttactaagaagaacattaaaacaaatcaccaatgactcttctcagctctcgcttaatcattcctacggacgcaactgcagccccgcgaaactgcatgcataaacccaaaaacgttacgtgtaagtcaagaaaacccaaatctgccttttccaaacatcagtaagattaatttaccttggccttgagattcaatgtgaggaacttattgagcgtgtgagatctaacagagaaagcatccatgtgaagattgctcagagtttccatgatgtccgcaactatgtagtctctgtaagaacatcttacttcgatcacaacttctgtttctttgagtttaactctcaaatgtgtcttatctctgaaaacagtgacttgttcggtttctcctgaattgtcatcgatcttcgtgctatcatcgtagttccctgatgtctcttcgatcaacacagagtcgttaaggttctctgtcgtctttctttgtctttctacaaaattaactgatcccatacaagattctagctcttctactcttgcctccagttcttgcaggtacttgattgtgttgtttagtatcgattctttatcaacctgcacaaagattcaaaacagagtgttggcttctgaaacacagtcttgtctctaaggatttagaaaaagagttattacctcgttgacagtgggaaccatagttctaaggacactgaacttttcgttctcttttcttctatctgaaggatcatcttgattcagaccagagttctgacttgggaacattctctttgtgtgcatcaaagggacatcatgcaatatcttccgcaacacattctgtgacttttttttctgaacaaaacccgagacttgctgctcacattgcttccaccgcaagaaacttgagccaggttcagaagtaacaatatttggctgacgatgacgaatgttcttatcgttcttacctgatctatctgcggagtagttgagtactgttgaaatggttcttttgtaatgcaagtcttcatcagaaatacctaatggaagctgatgcttctcttcactgatcttaatctccatcttcttctcgtcatcgttgtcttggtgtgcagatatttccatcaagcaagatttgatgtttcgaagcaggttatggtcttctgaaatctttcattgatcatgaacaaaattaaacaaagtaaggtatatttaattcttgtgaagcaagcaacaaaagtaaaactttatatattaagatggagagttaccaattcagtgacgcccagctcaatgactccgcccaagtaagggaaacacacaacagtctggagataacaacacagatacattctataaatcttctatccaaattgatatatagataactaaactttcatttctaacaataagagaactaaacttttatttctaacaatcagaatccagttataacaaacattataacgtacctgaattgatgcgctctaaaggagagaagccatatgaacagtaatgaaaagcaaagaagatcaaaggagatttttagtcagattcgatcttgatatatcaagattcaagaagaggaaattagaagtttctgagaacttactcttgctaacaaagaacgagagaagagcttgttctccgcatattgagcgttgcagagccatatggtctcacccgtcgctgaagctcttccaggcaaactaaagtatatacataaacaaccaaaaaagccaaaatgacaataattaatgatcataaaagagaaaaaaaaaacttaatctaggattacttaaaatgcaaaaggtgaaagtgtaacaaaaaggaaccccaaaggaataatcactccactatttaccaaatggttttggtggtactaaactctttacccaaagtgatggatgtttcatcttaaaatgaaaggacatttctcattacttctttattgcaaattggtttttctatatgaatagttcacaagagctaatatattttagtgtacaaattcataggagaagagagagagagagtgagagaacaaaccattgtgaaggagagaagacataggacatggagactaaatagtaccactcttcatcagagaggtcatctggtgacagcatcatacttgtactgtgacaattatcatcatcatcattgagattatcatgagtagtactaacagtagtaccactgtctccttcaagcatagacaaataaagtttccgaagctccttgcttttttgcaacccatatttataatgagattcataactcttcttcctcttcttcatatctccattgtaacatccttctccccactccaaaaccctaaattagtagaacatagtactcataagtaacccaagatttaaaagaagagaaaatggaaatgcaaagatgagaacaacaagatctgataattttggtacatgatgaatattagattatacttacccaggttgagtaagtgaagacgaccagaagattgcgtagctccattgaacacttcttacagctaaagcaagttgttttcttaataagctgttttgtcttttacttcttcctgctgcagcttctacaccatcagccattgtcaaagacatatctagatatcgtgaagaactgaatttaaaagtatggaaccaaagtgattgataaagaggagacaaccaaaaggcaaaatttattaaagaagggtttggtattgaagctttatttccttttctttctttctttattgctttctctttctcagcttggtcctgatggaaagtcttaaaagagtgtctttaaagttgagtactgtgtctgaattatgagagagagtggttgacttgggtcatgatcttggtttttggagtgacttatctttatacaatacatatggtaatagtgttggattctatttggtgaaaaccaaggtaaaatattctctaaattagtgatgatgctgaaaaatattgcaaaaagaaagattcaatatagtttttttgtttcctcctattcatttagtcaaaagcttggttattactactatactaggtgattggccaacatcatgcatggatatgaatcataaatttaagaccgatctttttaactcttttggatttgtgttgtcttaaatccactatgatgttagagtttatcgtgacactttttaaagaatacaacttgagatagtttgaccataatgattaatgttttgatgatttcatattataggtttggtttggatagttaatatccaacaagagacaatataaatacatgttgatattacattgtacttataactaatttagatgaatacacttatgaaatcaacaaagtagagattcttagattcttagttaaacttgtgttggtttatataaacttagttactttttttttcgtgttaagacatgtcggggtcttattgtcttacaatcattatatatttgtatctatcttgttgtgtggaaatggaacgtatcgacctacattgtttttttgtgttttggtaaacgtatcaagtatcaacatactttaacaaccaaaaaaattgaactctttgtctggctcacatcaatgaagatgattaattttttgttactcgatcttaaatatatgacaaacagaatgtagttatacgtagttgcaagaaaatggaatatactatttggatagtgaagattctagtttctatgatagatataaatgcgcatttcacccgaataattccatgatactctaatagattatatattaaacaaatacacactactgttcaagtttgataatcaatcgcgagacatcgcatataccgatcgttatttgtttaccatcaaagcactattttgtccgaagtaagtaaatatagcaagtggcagtaaaaaaatagtaataaaattgaaggcaagatcaggagagagctggctgaaatgaaggcaagaaactcgtgaaaataataattgatccatctctatccacgaagccctacataatttagtaacgcaccacttgtggttgcatgcacatttatttccataacgacaaaactttgtgtttaattttataaattatttctgttggcacaacacactcattatagccatatgtttgtgtttatattttctattttcatagaaacaattaatttaattttagatgccctagacattttttaaatgtatataataataaaattatagtataaaagtctatatattaccctaaattttacaaaacatatacaatcctaaccaatgggatcctatatcaaattgcattcaggatgaaaaagaagcgacatgaaccacgacaaagagaaaagttagataaatttaaagttgagtgagaacttgaagtctttaattctcattatacaagcaacaattttctttcttcggagagaaagaaatgagagattgcacaacacttcaagttctctcctaagattgttttgtggcagattgacataaccatccgtgacaatatcgcaaaggttgtggaagattgttgtcccaatggttcacccaaacctagttactatagttgggtcttgacttgtattagtttcagttttttttttttttttttttgttggggtccatatctagaagctgtcccaaagtaaataacaatgtttcttttggtaatagtaattcacattttatccttaaaaaatcttcaaaaaatgaatatgaaagttacgacttacgagagaaatgcaattgtaaaataatgaaattcaaatttaaagcttcaatgattttgttaagacagagagacgtagcgcattgattacagacgcgacacatctgacatacaacatttgccactacaatgcacgactgtcttcggattaatacattaatgttacatcgttagtatcaatcttacagattataaatagcttagccgattgtttaagatagtattattctaaattcatatacactcgtgcaagtacaacaacacactaaagttattaaataataaacacatttgatgtagataaactactttttttagtgacgtgactttacaggcccaataatatattctgaaaagcccatagtaatattcacaaaagccccttgataaagttgcaacgcgcgtacttatctgacgtgtcaggtcacgccacgtggattagaaaaaaagtggtaaaagacaaaacccttttgtactcaacggatctgagtgaatcctgaaaacttttttaggatttcaaaattgatttgaaccaaccaatgattcttggatcccatgaataagccttcacgtggcttttgatttcacattccacgaaaatccaattttaactgaatttgagataattttggtttagtgatggcgattaggttgaatcatagtgtaattccagtgagcgtgaagcttggagctccgacgagagtatcggctcggagctcgttaccgttcagcgttggagattggcgtggtgtttctacattttccggtgctaggcctttggttctcgcgaaggtgaaactgagagcagagagtactgaggaagatcgagttccaattgatgacgacgacgattctactgatcagctcgtaagtgtggaatttcatttggatgattcactcgtttgtgaccagaatcaattttactcttcgttttgttaggttgatgaagaaattgtgcatttcgaagagcgtgattttgctggcacagcgtgtgttcctgtatatgttatgctaccagtgagtcttcttttgattttatttttgttggctagagatttgtgtgtgtgtttggttgatttggctgttgaatgatgtagctgggagtgattgatatgaactcggaagtggtggaaccggaggagcttttggatcagttaagaactttaaagtcggttaatgttgatggtgttatggttgactgctggtggggaattgttgagtcacatacaccacaggtttataactggagtggttacaagaaactttttcagatgattcgtgagcttggacttaagattcaggtaatgttatttgatcgatgagtctcagttcagtttagtgaaagatatgcagagttgaggatgaacctttttaaagtgttcttgacttgaattgacttcaggttgttatgtcgtttcacgaatgtggaggcaatgttggagatgatgtgcatatacaaatccctgagtgggtgagagaaattggtcaaagcaatcctgacatctacttcactgacagtgctggcaggcgtaacactgaatgccttacttggggaattgacaagcaacgtgttttaagaggacggactgctcttgaggtatggctttctactactccatgctaaaaaatctgtagcaaattatcattcgaagaatgtaatctgcagcgagttgtagtaggaagaatgagaagttgatctgtaataagaagtgtttactgactctatgaaatcacttgttatgtaggtttactttgattacatgagaagctttcgtgtggaatttgatgaattctttgaggagaaaatcatccctgaaattgaagttggactaggtccatgtggggagctgaggtatccttcataccctgcacaatttgggtggaaataccctggtattggtgaattccaggtaatctttttgacgcatcataagcgtatacaaaattacattattatcttacattgctatttggacaactaatttattagtttacttaccgatatatcttctctgctgtgctgtcctatctgcgcagtgttatgataaatatttgatgaatagcttaaaggaggctgcagaagtaagaggccacagcttttggggcagaggacctgataacacagagacttataattcaacaccacatgggactggattttttcgcgatggaggcgattatgacagctactatggtagattctttcttaattggtactcaagagttctgattgaccatggtgatcgtgttcttgctatggcaaatttggctttcgaaggaacttgcattgctgcaaaggtaaacaaagctctattgatggggctagtgcactatattatactatatttttctggcttgtgttgatagaaccatttgtttgtctatccatttttggaaatcagctctcaggtatacactggtggtataaaacagctagtcatgctgctgaactcactgctggcttctacaactcctcaaaccgtgatggctatggtccaatagctgcaatgtttaagaaacatgatgctgctctcaacttcacatgtgtggagttacggacacttgatcaacatgaggatttcccagaggctctggcagatccagaaggtctagtttggcaggtcaaaacttcttcaacttatacaagtgattggctttaatttgtttaggccaaaatcttaacttgccaaatttttctttccattgttaattttttcaggtgctgaatgctgcttgggatgctagtatacctgttgctagtgaaaatgctcttccttgttatgacagagaaggttacaacaagatacttgaaaacgcaaagccccttaccgatcctgatggtcgccacctttcatgtttcacttacctgaggcttaacccaactctgatggagtctcaaaacttcaaagagtttgagagattcctcaaacgaatgcatggtatagcttccgtttcatattctcctagtggaatttagtgtcttctcaaggttttataacctggggttactttcacttgcaggtgaagccgttccggatcttggtttggctccagggacacaagagaccaaccccgagtgaatatatatagtcctccaccatgctactaaaaacacttattagcgcctggttacatataataagaacgtcttggcttgggtttaccaattcagcatagctaagttggagggaatcaaaaccaagattgtaaactgagcttgtaagttgtaagatgaatagtgtatagaacaatataagtggtatgtccattgatatttcagaagaaattgctagcaacattacaggctgtgttacacacaaaaagagctataacaacaaagaaattcttaaatctctcaataatgaatttcatctactttgcttctctgattctatatcctattttctacatttacacctataacaagattttcatgtttcttgaccacacaacaaagcttgagattcctgatttttgaagatcatatgttcactgttgtcatttacaggaaaatggcaatctatgaattgatcccattttcttctcattcctttgaaggaccacccggaaggggatccttccatgcctgatcctgcagagctttctccttcttctgtatcatggaatgttccataagacggcgatggagacatggggatgttcagagaagctgctttcattatagccgctctgtattcttcgtcatgatcctcaacaattgatttctggcgtacaattttctgctccaccggaatctgcataacttggtcctcttccaccattaactaaaaaatttcaccacaaagaaagtgcgtttgtcagaactcaccatctccaaaagctgaagcagtcacaaaaagcaaaacacatttcaaggtactcacatcgagagctctctgtgattccctttcaatccagatgatggcatgatccgctgttgcattacaggagagaacaatctgctcaaatctcccatcaactgggacagctgttctcacaacaggtggatatcttcctaatctgtataccaagggcatggttttcactttgaaacccgtgtcttcgagttgacgaaaacgattttgaagcacatgagtaaacataaagtataaatacctcaagggcttgcgcacgacgatatggtataacctaccaggagcatatagacgccttgcatctttgagcttcctctcctcgaatgtgaatgtatctttcaaacatgtgagacacaacaagcatggcaagctgaaggtttaagatttatacaagagcatgagatgtttttcatcgtctaaacttaggcttataacataataactgcttttgaatttcatactgtttcattaccagataattgacttgaagacattctccagagctgtggtagtccgaggtaagaaatcatcctggtttatccagagcagcacgtaaaatggatcagaagagtcacctaaacgagtcaatagaggctgatatatacaatcatcatacctgtagaacaacagagttgatgacatctgcatatgtcactgctagatggagagacatacatcttggaggagcaatagcaaagcatctaatcctctttctctcaatgttccccaacctaacccggttctgaatcacgaataagacaagcaaagaaacaacccctgctcctaacgaatgtccaacaaacgtcaaggaatagctcgggtttgcctcgagtaattcccttagaaccacatgctcctcttcaaaaacccacatggccgcctttaacaacccgttatgtacataacctccatcaaacttagtctgcccaagtttgttatcaagaagaacagcataatcacactccttagctaaattcagccctctaatagccaagaccacatcaccattctcatgatccaagtagatcatgtaaggcgtcacacgaccctcagtctggtcatagtctttcttcagaataacatgatttggatcaatcccataaccatcaggaggtgcccacatagggtcatgaagattctcctcatagacggctaagatcaagcggcagatcctagggataggctcaaactcatcagatgtagctaatccccaattctcactctcgtgacctgctgagtataaacatttcttccacaaccaatgggtacaacccaagcagtacacacattcaagtacaggaacacaacacagtatcgacatgagaacctatgaagcaagcaagcatcctctgttgaattttctggcgatgggatcggagtactccaccagaacccactgacacgagattagtcagtgtggatcaagaggctctaagaataaagacagaataatcataagctggtcggatcaagcttgtgttccaagatttgtgtccgaaaccaccaccaactactctaaaataaaaaaagaagaatttttaacaatcaagtgatttcttttggcgctgaagaagacacgaattagagagagagaagacaagtggaatttgttatctacgaaatgttcaagtcaaccatagttcgtaaagacgaaacaatgaaagaaacttgtgggcaagaagaatctactcaccagtcaccatagatgctcgaaagattccattagcatcctcgagactagcggagaaagacgtgcaatgtagaaatttcgtcttcggaagctgtcgggtcgggtcgggtcgggtcgggtcggatctgtgctgagtgtagaagaaacttttgttttctataggacagcgtattaggatttaggaccaacaaatttgggcttttagctataggcccattaaatttgtcagcactgcatctgagcggtgtccacagactctatcgtatacccaagggtactggataattacctcgttgcattttttatttgtttggtcagcatatttttagttgaatgattgaatttgccggccaacgtttcgacagtctctacaccgtcatgaacactgaatcaggtaattccgatatcttttttctttgttctatcgccggagaaatgaaagagatgttgaactgagagtttttccaagattcggatgatttttcatatgattggttgctttggtttgtagttgtcgagttccttgggaatgtgaccttgttgcagcggttacctagttcctctctgaagagaatctccgaagtcgttgtcttcaaaggttatggtcagtgattctgggattttaatcttgttcttatctcgaagtcagtttgattgggaatttcgttatgttttgttgatctgttttcagtgtcagtgtgtgttcttgagtataagcacttgagcagtgattttagagacagatattatgtttttacacaatgtgatcttctttgggaatgtgcttcacagacagaggtgattatgtggttcgtgaaaatcaaaatgtggatggagtttattttctcttgcaaggacaggttcgtgtctgtgtcaagttacttctgtcttatctccataggttaggaagttagatagactaaggctactgcaccgtgtttatttataactattttttacttgtgtttgcaggctcaggttctgagatcagccggagaggaaaactatcaagagttccctttgaaacgatatgatttcttcggccatggtgagaggatgaatctttcaattctggcctttcttctgtgtcagtgtgttaatttttgtttatggttattgaattggcttcaattaattctcaaataggtattttcggggatgtttactcagcagatgttgttgctgtgacagaggtgtttgctaaaaattctctctactttccttaggtggccttggtttccttgagctcatgttatgctaatggtaatagcatactgagtactgtttttatttctgttcttgcagcttacctgcttgctgttgatgtctgatcatcgtgctttacttgaaataaagtcagtctcggattcagataaggaacgctgtcttgtggaagacatactatatctagaaccattagatgtgcgagtctcccctaactgcccttcatttagttccatttcagttcttatgatcaaagttctaaccattcacttttaccaccattccttggaatcagaattatagcattctttcttccacatttctacaaatttctgttcgcttcttaccttatatattactttctctgccagtaaattcaaggaatctcatattttttgtacttctttcttgtagttgaatgtataccgggggttcaccccacctaatgctccaacctatggaaaggtttatggagggcaattagttggacaggtatgaaatttactcatgtaaggctacgtcatgtatttagtaaccctgctgatcatccatttgcatatgtagcttgttatgttctatttatatcaggcaatggaaatatatagtaatcactgtgacacaactgtctatgcttcgcaggcacttgccgcagcatcaaaaactgttgaaactatgaagatagtccataattttcattgctatttccttcttgttggagatataaatagtaaggggtagttttaatgtgcttttgcaagtaagcaagcaattgcttttcctcctaccttaaaaccatgcctgctgttttccccggatttctctaaagctcacacatctgttacactttgtaaattatcatagtttgctactcttgcagttcccatcatatatgatgttaaccgcttacgtgacggcaacaactttgccaccagaagtgtagatgctagacagaaaggaaaaactatattcaccttgttcgcgtcatttcaggtttcatgttatattcctgaaatatttcattatgaatctctgtgtttctcttactatgtcataatcagcgaatagcttttcacactttaacacaacagttaaaaaccttgtagcttctgtttttctttggttttacagaaaaagcaacaaggttttattcaccaggagtcgaccatgcctcatacaccagctcctgaaacggtaaatcatttctcctactttcaggcttataaaatgaattgcgatgattgtcagtttgatcccaacctactgcagcttctaccaagggaggagatgcttgaacggcttgttactgagcctctgctacctaggtaagtggaagtttgccagacctattattccaagagctcatcagagtcatacacttctcaattattccttcatttcagggattaccgaaaccaagttgcaactgaaattagtgttccattccctatagatattcgattttgtgagccaaatcgttccactaaacagaataagtctcctccaaggttatcctagttgtctaactcatgaattaatcaattttgttgtttacgtggttgctgataagaactaaccatttctttcctataatcatcttgcagactaaaatattggtttagagcaaagggaaaactttctgatgatgatcaagctttgcacaggtgagcaactctacttcagtggtattaaatagaaagccgcctaaaaacttggtacttattcatatctagacaatttgaattattgtagcgttcacctttagcattccaaggaattcacctatcagcgatatttaagtatcaccggttgatatagttgaaatgtaatccagattgtcttaacattggcaactagagcgtttgtttggacatgtatgatatatctcttgcagtctatctgattgtcatgcgtcgcccgccattgttttgcagatgtgtggttgcatttgcttccgatttgatattcgccactatcagtttaaaccctcaccggagagagggcatgagtgtagctgctcttagcctggaccactcgtaagctttttcttttgtcttagcgaagtgtgagtttgtatcattctccctacataagtacaaacgacttaattcatatatatacacgcaggcgcacacataattacatacctgctctatcgtctattatcttgattttaccatcttcgaaaacaatgcctcgagtaaaagtttcttacttttcttatgtccctttgcaggatgtggttccaccgacctgtaagagcagatgattggttgttgtttgtggtaagaaaagctcatgtttttcttcttctttttttctgaagagtaggagaagttttcttaagaaggaaaagttattactagtagaaaaccaaatgttttgtttaggtcaactgaaactcaaattgtctaaaatacttcgcgcaactttgagttgttttggagaacactagcaactatagattagaacaacttgcttgtttagctgatattcgttgaagtgtatagatcaaccacgtagggatatttatctttgtgtttacattgacatggtaaaagaagtaagccacaacatttttagtgttattgttattgttaaagatgtgactgaatccttaagaaatgaaaactctgaacaagaaaaatatactaacaacatttcccttgtgcagatagtgagtccaactgcgaccgaaagccgcggttttgcaactggcaaaatgttcaacagaaagggagaggtacgttgttgcatcgaagaagaatgaagaatctaatgtggtttgcaaaaatcgagctcttattcttttcaaacgttaatatatagtttgataatttgtgtgcagctggtggtatcattgacgcaagaagctgtgttaagagaagctgtgactattaagccatccttcggggccaagctatgaagccataggattttgatagtgagagaattgctgcatctgttactcctcacggtcacattccaaagagtcgtcacttatactacatttgcatatgtttttcgatccacaattattattttcccctctaaaagggtctacacatatgtttgtttgtaaccacgataatgtttcaacagcaatgaaaaagcaaacagtggttcattttacaggttaacgacgtcgttttggatacaccctcttttaacgttattatcattttatcacacagtcccagtcttcagagttaaagacgctcctcaattttgaaaaaaccctccatagtatctcttctacagaaccttgagttttcggagaacctcgaatctcaatggaatcaatggcttcagatcccgaacttgacatggatgaaggagatctggagaaattggagtcagatgtgaagcagatggccaagaagatctccgagtacaggcaaaccctaccggatcatctcaggaacactcttgattctgcgctatcttcccacatacccgttttccccaacatcgattccgggtcggatcctcttccgtcgtcatgcctcactatcgcaggcaggttccttctttgttccttttttttttggtttttgcgaaatcactttttggttagagaaattataagcaggtctaaatttagggcttattcctggaaattatgtgtcttttctcttcgtgagaattggtgatgaatcaactacactcactagaacttgtcaaggttaaagctaaaagctagagtcttttttgtagttttgaagatcttgtcaagtattcacagtatcgtagagaaacataagcttgcagtgattcttttcttcttcctctcttatcagtatgatatatcaatcaatctgctgtgttttatatttaatgcagaaaataggcgcataataatgttgtagttcataagagactttgcttgagaagagttcatagtattgtagagatacacaagagcctgcactgatctttgtcatcttcccctcatatcagtttgctgtattaaccaatcttcggtgtttttcttttaaatgcagaagcacaggtacctggtgtgttggaagagcaagactctgaagagaaatggattcagctcaaggaaagaatgtcgaggaacgctgcgaatatacctaaagttgtaaagagaatgcgagaatgtatagagagtatcgacaaactcgattctttggaagttaccattcacccggcattcaaaaggcaaagaattaactgactatttctccttcatgcttaggctctccatagtattttcttaggaaagatatgtgtgctgatttgtgaatatgtaattctagattgatctggcatgtacattggtgtcgtttgattcaaaacattcacaacatgatatttgattgtgcaagtactagggaagagattaagacttgttactggaaacaaagtcaaagtaaagggttaaaccatagttgttgatcacaaaagtagattgacaaacatttctagctaacatgttcatttagcagtgtcagatggttctttaccagatggctctccctttggtccaaagatgaattgcttcacagaatcttgtgctgctaatatcttccttttgatctgcaaatacacccaaaaaaaaataccattaagacctaaatggctgagaaaacgcacccaatgttcaataactaacatgaacagatgtaacataacccaccaataactaaacctgaatcataacacaaacaatcgatcgatcaagcaattagttccacattcgtattaccaaaacttcaactagaagaagtatcatagaggaagataaatactaagaagaatcaccctaaatcgatcttctgattccaaattttgtcaaaaactaatcagaaacgagtttcattatccagattttcatggaaactaaataatcaaattcgcagaaaggagaaaatgggggaactaacgggatcaagaacgttgggttcgggaccgtaatcgccggttaagagaaagtaggaagcaacagcagtcgccaccatcgtcgttcttctcaccactttatcggtttgaggattcattatttcgtctcagcaaaaatgcagcagccaaagcaagcaagcaagagaataatacaacattcatctcctagtaagtgtataaatgttgatagtttcagtgccgtttttaagttttactcagagactgcaatacatgctttcttcagttaaacgacacagcgtacgacttagttaagcataaacgacaccacaatgcatagtccaccgcttcaggccgtttgtaactatccgagtaaaaccgcttcgtgcctgatactgatttaaagtatccgacccatttctatcaattttcctctttagtttgggcccatctaaaagcacctgaaaggctgaaactgcttgccgttttttaatattcaatactgagactgatttaaagtatccgctatcaattttcctctttagtttaggcccatctaaaagcacctgaaactgcttgccgttttaatcttcaatactgagactgcattacgttttgttttctagcccattacgtgtcacggtgtgcgtatcttttgataatgtctcaatcaaaacctttggattatcttttgaacgtaaacacacaacatctttttaacataaacgttaaccgcaacaattttgtgatatcaacactggttgattttaccaataaataaataaattataattgtagaatcctttattatagaaaaagttgttggtttggatctagacatctagtttttaaattgtgtagttacactacttaaaaatatattaacaacaagtccaaaaatctaaatgtaaattcgattttactgaaaaaaattatatttaatgagaaaaataagcaaattgtaatataacaattttcatctatttacttttctttggttgattattgtcatctattttaatgtttcttttttattgcctcaaacaaattagccaacagagtttatttcactagaccgaattaatgcaaatcagagaaaaccataataataataaaaaaacgtgtccgatctgtaacctaaacactaacgtaaccaaaacggacgcacaagaccggatttaagatcagatttttggggcagaatcctaacagagaaattgacaatcccgtttcttcgaccatgttcgtcccacaatctgtaactcaaacagtgcataaatccctccggtgcatattctcccgtaaaatcctttaccggcacacgtgccgttcccacgcgcttatccttccctgaactccgacataaaacctgaacgtacatcacgcttgtcgctttttcctccgacgaaaactcagtctctagctcatcctcccacatcggacaattcccaccgacctcgtcgacactcgtcctcattggctgtttccaatagttcccggccatgtcgaagacaacgaaggcgttcttattcaccggttttctaccgtcgaccagattttccgccgatacggccgtgatttggatcttacgactcattacacagagaatgctttcaagatataaagattgtgcttccttttttcttttcacgagaggaacttgtataagtatatgtattagggtaactttttgtaaaggctttttaactttttactcggattaggaaattaggaaggtgatgagaaattaccacacacaagaagagaagcttctctctttcttcctgataaatatatcggaaacaaaataaattaaaagactaccataaaacctatgtttacttgtacatcaaggaaaataaagcaaagtttaatgagttattattaaactctatgattcctaaatacgaaagctaaaaagcaaaaagaaatcaaaagcactttctcttctcacagaaagtcaaaatctaaacgcctctccaagggttttgagccagagcaggtgttgcgtttcacaaatctgtatttggatgaaggagaagctgaaactgagtgatcttcctcacttgacatgtgacttcgagcatctgttggaaacggtgtatcgtatttttgtctgagccgtttcaaacctgaagctggtgagcttgttttggagataatggagggtgtgtcgaaagtcctcgcagccattctaagtctctctttcatctccctcacttcctttacgcacacagtatcgttgttgctgttctgtggagtttctaaacacgctgaaacttttacataaagacttgttaacatgtgatgatcaattgtagaacgtatccaatgagataatatttcagccttaccattgagtcttgcacaaactgagtctactgatgatgagactgattcttctcctctaagagagcttgtggatgaagaaatgctcctccaattcagtcctaaagttaaatccaagaaatccctttgaggactctttgcagcttccttgatttgtgatgttatgcaactctcgaccatcgtgtttctttgattgaaaaagttgtattcaaaaccagaactaggtttagaaccatagaccacaccagagaagaggttactaggaaactgctctagccttttcttaactgaacaattccaatggttcttaatattattctccgtcctgttagttttcacgaacaagaaggttagttaaatccacaacaatgttttcttagttttaaggacaaaccttccaggcaatagcttggcaatctctgcccatttgttgccgtttcctctttgtgcttgaacgagaattaattcctcttctctagtccatggagattttataatagtcggattcaaatgattatgccacctaagacataacaaaaaacccataatcaacattatggggaaaatgtggacttgtcatcaagttcacaaaccaaatgtgaaaagaaagaaaaatgtaagaaacctttcgcggcattgcttgccgatgcgaccagggagttcctttgaaatttttgaccatggaggcctatcattctccatataatctttaaccaactcacttaagagttcatcttcctgaatatcaagagacatatatgatcactaggtaatgaaacaacgtaacatagcatatattaagaaaggaatgcaaaagtagttacctcttttttccaagctcctttttggaggcttggatcaagaaccttaagccaacggtgctgacattggacatcattcctcctattctcttccgacccaggaaggcattcagctaaaccaaagacaagagaaaaaaaactcatatagtgtatattggttttagggcaaatattgatggctaacacatcaaaatattatttaccaatccttttccagttcctcccttggtacttcttcacaacattcgtcaaaatttggtcctgcataagatggaaaaaaggtttcagtgacacatttatataacttggacaagacataacaagagatataagtacctcttcggctgtccatcctcctttagttgatcttctagtaggaccactcactcttctgtatctttaaccacaaatcaaacatcacaaagcaatcataagatcaaaccctaatgacatataaacatatatacttaaaactgatattataaatttcccactaatcttaatcatcacacataaaaaccttaatcacatatatatataacacccacccccaaattcatcaagttgcaacaaatataaaccaaaccacaaaatataattgaggaacgaacaagagatggacgaagagaaacatacccttttgaagagtcatcaattgcaaaaataggagtaacgtcgtcggtgttgttatcagactcggactctgatcgatttaaatcaatagactctgtcataagtctttcagaaattgacaaaacctaaaaccctaaataacagcctcaactaacgagaatatagaagaaaacaacgagatcctaaactacataactatcttaaactataaattgaacggacaagagttttttcaatcgcaaaaagttctaatctatgagagaaagacttgaaatcgctctgtcgagagaaagaggagagactgaaaaggatttgtcgttcagtaacggctatccaaaaaatctttttttatgcataaagagattctctagtccatttttctctctaaaatattaatatttaattactttttttcttggtaaatgttttttttgtgggattaagattctatattatctttttgataataaaaacaaaaatattagcaaaatagaaaagattcacaagatctttattagaagaaaagtgaatggtatgcataaataaaatccatgaaaagtaaaccattaatgcacaggacacgagttactcatagttcatatgttaaatggttttcttattagcaattagatatggctctaatatgagcaattggccacataagtggacaaatgcgaattcgaaatgatatgtacagcttctgattcttttaatggaatcatatactaaattttataattcagactcgtgtcatcatacatgttccacaagatgaaaaatctaactttcatcatcaatattacaccaaagctgctatagaatgattcagatagtatacattgatttatacacaaaaatatcccaatgatatgcagacaaagataaattaaaaaacaggtcaatcttgcttgcgagtatttggggaaggagtgttgagagacaaaccaagatctctacataactcttcatcgggctgcaagcttccaggtatagcaccaaaagctgttctggaagcttcaaatccagacgccaagaaatgaatatacgctgacatatcctccaagtttttccccacactaatcgaagatgacgcaaacacacttctctttgacaagttcgaatcagctcttgataaccggttcagatcagagacttttataaaccgttgtgtagcagcttcccatgatagttcatgcctttgttgctctgtaagttgcgatggttgttccccaagagccttgagcgtggctcttacaaaaccttgtccatcgtcataggttctgcagttgggaaactgtttgaagaacttgttcgatatgtgattcgcgcatactactatttttcccatcgccaaggcttctgcagttgttgtacacacaacgtctgtcgtgctggggttgagaaacactttatagctgaaaatagaagatggaaaagtttaaggtatagaatccgatagactgcaaggaaatcaatcaatcttgaggctgttaagaactagagacttacttgtgaaatagcgagtcagcgtgatcacgtcctgggtaaacattaaccgtcaagtcgagttttcgggctgcttctttgatctcttcagagtcctctccatcaccgtataaatcaacctctaactcggcaagttccttttggtgtttctcaagtagtttaagaagctccttgtaccctttgctccagaccatcttaccaatgtagtatgcgcctttagtgaagggctgctcctggagcttctgctgttctagttttctcaacccaatttcgagaaatttagggttgacgccatgaacattgcagactatagatttagggtattcttgagtcgcagcagataacctgattacctgcaggagtaacatcattggtacaagtcctgattcacatcaaaaggaccggccataattgtggtcacattccaacaaactgtcttgattctcaaattaaacccagccattggatatattcacataattgagcaatcactctatcatgtcctagtggctgtaaagaagaaagaagtttaccttgtggcagtaaatgccaacaacccaactatttaagtatttgaggaaaaatgctttgacacggccttgtttctctcttttaacgtattccaagtagttagtgtgtacgattcctatgacgtagttgaacttagttttccatttttggccatgatgaaaccatgtgagatgctcaggctcctcgaggacagcaatgtctgcctcttcatcaggaatggcatcagatatatccccaacaggaagaatactccttttgtcaatagcaaactgccataagataaatttgaattgctaaggttggcacaacacagtcacagagtactacgtaaaagaaatggaagaattcaactctatatcacacggaaatgaaacaatcgactctatgaaaggaagcagtatgtgtttggtacccaaaagaagattcttgagagtcatacctttccaggatagaaacgtatctcaaaggctaaacgaaaagagactctctcctcaagccactggcggacataagcttcttgctctgacggggaactaaaagtgatgctatttgggtagacaagcttttggtgcttcaaagtcagccatggaatcaccaacgtgacccgtctttccccatcatttgcaaggtaggcagcacggaagagaggattaacagcagttcccgtaagccatggaatactagctgttgtaaatatcgcaatgtgttgctcctgctgattagtcatatcatctcaagctaaacctctacaaattatcaaacaaaaagagtaaaccaatagattcttgtaattgagtttgatctgattattgcatcttcccaataaggataacattcgactacaaattcttaatttttctgcaaattcaaacaatcttttcacacgattcaagcgattttcgattacatcaaaaaaaaaaaaaaaaaaaaaaaatgaagccatacctgtaagattccaattcagaaacaatctttgagttgacagaatttataaaagctgatgattcgcgtcgagttggggcaaataagcaaacgtagaaggaagagagacgaaacaatattctagggtatgcgtgagaaggagagaatattctcggaagatcttcttcgtttcattgtttatacaaaattaacagactggttggtcttcgcaggatcctccaatctccaacattctttttccgccaagtctagaacgaagaagaatctaaaaacgactttgcgtgtctagactacgtgtcgtttcttttacatttaaacatcatcaagtttcactttcaaagttaagaacgccgggctttgaccagtgttatagggtaggcccaattattgacaagcccattgcttactcaaactgtgtgccgtttcaatcccacaattattgattgaaaaccaaaccttaattccgaaaccatatcaaccgttttacattggttttctcaaaccgagatttttctccatagaaagaagcagagtggtaaagaagagcacataagggaatactatcatgggagcatatgagaatgagattcagagtcaagcgttaacctaacaccttccttgaaagaagttggagagagctcaagtgtatgaatcagtttagttatgtccatagatatatctgctggtgacactacgccacgatcaatctgacaaaatagctgagactcattaagtgactgatctgcaatattcaacaagtgagattcatttgtgaaagcctcatacataccgatgatgcagacacatgtttaatcaaggacaggtcgtatcctctgacttctgcaaccatttgagccatttgaacacgagatagcctctcgggtccaccagcattcagaactagccgcatctgtttatcatctgaaagcagcaacaacatgttgttatgattctacattttatgtacaatgatgcagagcgagagaatgaaactcagtaaaaaagaatctaccagagacccatctgtctattaatttgaaagtgatattcacaagatccttaacgtaaatggggcaacgaaactcgtcatggaagaagtctaccgtgtcccctttctttaaggagctatcaatccactaaaacataaaagacgaccagtttcatggctaactcaatgaactcaagtgtgtatatatatctctgagaaattgtgttaagaagcacctgaattgggagagtcttggggagaggtgatacagtttgaggaccaaagatgatactacttctcaatattgcaaagctttgacacttatccttgatgagaagctctgctgcaacttttgatttcccataaacgttgactgcaacagtctcatcttcttccttgtagaaagacttgacaccttgataaactgaaattgagacatgaaaaccaagtgcaaaagcataagtcatgactcatgatgagattaacactataacagtggctaatgcaattggcaactaaccttgatcagtagagagatgaatcaacaaggttttgttagtctcaaaacttgataaccagtttacaagagaagtaggtacgttgatggacatggcggaatctggatcttgctcgcaagctcgtgggacagacagagcagcacaattcacgaccacatcaggctataatcaatggaacaaagtgttgcttttcagaccagagagtctaatacacagattcacatgttcatttaccaagcaattcctagaggaaagaacattaatcgagctagagattacgaaatcggaacctgacgaaagtcctgggatatggaattgagccctagaccggatttaagatcgacaggaaacgcgggggaatgagggaaagcgtcgagcaaacgagcgggaagtggagaagaatggtgagtgaaagcgacgtcgtatagctcacattcaccgccatagttgccggcgaaagcttgaagaagatgctgacccaagtatccagtacctcccacaattagcactttcgtcttcttctccatacttttcccaaattccccgatccaatcactctccggtgtttgcttaatttaaattttaacttaaacatagcacgatcactgttggaatttccggtttggtattctggttcgagttgatattctccggtttggaatgattttcggttaacatgcttctgcaactgcattaacaactcttcaaagttggttgaatctcgaaaccatttaaaccttttggtatcagaacaaaaatggtaaagcaggaaaatgtagaagaaagatatcattattggcttattattgccaaaacagtatataaagttgtaatcattatcatcagaaataatcgtaagaagttggaaaaatgtccaaaaaaaaaaaggaaaagtacaggttgacctagaactaaccctgttcttgttcttaagccctctttttggcattgtttttcttaaaacatatcacattttgaagaaaaaaagaatgttgatcacaaataaaagatgaagcgaagattttttgtcttttggctttctatgaaacctgagaagagttatatagagttgttgtctatttctcgtgaacgagagggctgtaaacagggaaccacatgttgcgtgtaatgtaattcactgtatcctcctgttggtggcattaaatgaagcaattagattccattttctaaattaccttatacatgttctgatacaaatatatctctcagttacttgattcataccttagacatgtggctgagatctttgggaccaacatcaccatgtccttctgcaatgtcatcagtcaccgcagctcgtagaacagctgccccgacttcagctgttatgtgtcggatgctgcaattttttcagaaaccaattgcttcagataacagttttaatatactaaaatataatcaacggataagaatgagagggatttagaggaattacttgttgattgaagggtaaaggatgcctttttggacttcttcatcggtcatgtaggacgcaaggctgtgtatgtttgaatatgttaatcgtcagcattgtcataagctcatttttaaaatttgaagagaacaaaacgcaatcattattaccattcagaagctgcttgtagcattccatcagttacgatacgtgcaccagagagaagagtccctagcccgatcctggaaacgataatgaccaaattaattctgataactatatctatggattgaaatgcaacacagtgaactatatctatggattgaaatgcaatacagttcaacagttttcaagaaagaaaacgaaccccgggaataaatacatgttgttagcctgattcacatgtcctactttaccattctctgcgagtgggacaagaaaatgtgattattcttagattatagcaaattagatacaaagaccatcaatgaatcccaccataacataccaagttcaacgttctcaaatggacttccacttgcaaagacaatgtttcctccggcgtgtttgaaagcatcagcagcagtgcactcggctgtcacacgaaaagatgttcagggcagatttttcaaagatggaacaacattactttgctaagctaaaaacacacaaaccattcaaagtgggattcgacatggcaaaaatggcaggcttgcatgagtcagattctcgcatcgccttgagaacctttgatgattgaaaccagttaacgatataagtaaaacagttaaaattcatacttcttgaaactatttgttgtctaagaaagtcacatacttcttcattaaagataccaccaactccagataaaccaagaagaacatgtggcctcactttcttcacctgaagacatattatatttagacagaaatattatcatatgattatgtctaacttttggggacagtaaaaaaatatggttatcctgtgttgctttaggatgtagtagagaaagcacattaagtcaaagtttaatattggccaaggcaagtaagaacgcaataataaggcttaggcttaccacttcaacgatacttgctccctcgcgtatctcagctggatttttggcaaaaagtacagctcctgggtcaagttttgtcctctccgtggtgacaagaccctgaagtacaaatcaagtcgttttcattaaatattcgaaggagcacgatcttatgaggcaaacagatgagaaaacaatatgttgaccaatgcaagaacagaaaggcttttggataactttaaaaacgttttctgactttttctaggtaagctcttactggattgattaaaccaacatccaaaagcaagcactaaacattacaataatatgacagtttcaaagtcaactgccccgtggaactacgcaagcttaattgttattatcaagcaagacaaaccgattcagctgaagtcaagtagtgaaaaaacaaaaacttacatctttatctatcaggtaaaagttttttgttgcttcactctcgctgatacctgccattctggcaactgcctgtactgccatcttagttacaccaagcccagcactgaaagtaataaaagaaatatacaatgagaagatgagaagaaagttaatgtaaatatataaatacagaagaaaaggatttcaagtgaatatccaagtaccttccagctcccaccacaacaatcttttggttcacaaagtcggatatcggccgaccttgagctcttacagttcccaatagtccagccagtgcaacaccagcagttccctgataactcatacacaaaccttattattattatttttgaaaaagatacatacaagaagtagctaaaaaggaaggcagctggattgcaaaattgtgagcatacctggacatcatcattgaacatgcaaaatttcttccgatatctttccaatgttccgaaagcccatttcgcttggaaatcttcgaactaaaatgatggaatgaatcatttagtcatccttccaaccgaaaggtaaatctaaagaagatagtaagagatatatacctgtacgacggcctttggccaacgtgtaaatgcagcttccataaattcatcaataatctcaaggtactcctctccttccaacctaggttgtctgactcctaaatctgtacaaagggaaagacagacgaatgagatattagggaaacacatgtacaccacatggaccaattaagttcacagcttacagagatcattctgtaggagcttttcattatttgtgcctacatccaacataattggcaaaacctgcagaggaacaagcgtataattttgaataaggaggtgaaaccttagttaggtacagcaaacaaaaaaacacacacaagatcatgtggagatcaacatactctctgtggattgattcctgcagcagcgacatacatgtcgagctttccaataggaatcccaattccctgtactccaaggtctcctaagcccaaaatacggctaccatcagtgatgacaatcatatctacctgcggagcaggccagttataaatcatagacatcatctctcctttgtctttggcgctgaagtacattcctcttggtcttctatacaaaccagaatagttctgacaaacaagtccaaccgtaggagtgtatataatgggggcaaaatctttgatgttatcaataagaacctgcagagaagatgagttatgatgtctcagagatgtgtcaatgtgggacagtatttagagccaaaaagactcactcggtagtacaaagtctcattacggtcatgcaatctattcaacatcctccatttagctaatgcaacaacgttttcaggctctccttttgtgttgttctctagcgaacgaaacgactcaactgccaaattatgtttcaaaaccaaaagtctcagaaacaatagaaagaaacataatgagatttacttggaatcaaaacttactgaaacgatcacattgctgtacacaggtcataacacgaggaggaagcaagcctcgtatccctaatctatctctctcagtcaaaggaaaacctgtgtcctgcaaaagcaccaaagagatagagagaccataacaacaacaaccatcagcattataatcaatttttagaaccctaaaattcagaagatcgaggataaaacacacaaccttattgaaccatggatcgtgaagaatatcagcaccacgcttgtggacgatgcaaggaccaggaatcgctgtggaaaagcaccgccgagatccgtgtgttcttgccgctgccgctgccttcgacaacccagcaatgttcttccacatcatcggtctcgaaatatcactcaggatccgacccaacactacacaattgcaattcaatgattttcacaagttcaaacaagaaattgagaagaaaaataaaacagagagaacaacaatgatgagtcaaagagaagtttaagctttgatcgcttcttcttacgtttccagtgtgaattggatttgtgttctcctcctcttctccagtagaagaagctgtgtctgaggaagagggaagatgtctttaagaacagctgcccgaagaatagtaaaagggtcagacaataaataaagctttccaattttctaaaattgtaaagaagaaataattcttttattcaaaagtcaataaatacaaggaaacaaaaactgaagttgcccgaaggaaaacgggcaaagagggtataaaagtaaatgtggatatatagatcgccacgtggacggttgtgaatcattttccaggcatattggtgatgagactagaggtcaaaggatattggctaactcaccgttagatcaatgacacgtgtatccgcgttctggtgtttccgcttttacccatgcgtgtgcctctggtaacaaatattacgtcttcctaaaataaaaaaagtaccaagtagagaaattagagaaaaggaaaggtaatatataaatttgagattcgagtgttttaagtgtaaaccattcttttacaaaaaaatattcgctgcggcgacttgacaccgtcagcttttaactcttaaacagtgcttttttttttttcctaccattcattcatgtcaagatttcgaatcctataaatttgatcacagcaaaattaaacatagttaagggcaagggaaaaaaaaaagaatgcatgcatttatttatttattttgacataaagaaaacattcaagatgtgttggtatttcataatcaaatactactaacaaataactataatcttaattgtcttttgtcggccaataaactcgatccaaaattctttgtcgatccaaataggtaaaaaagaaactcgaataaaaattcatatacgatatgaaaaatattacgtacgtagtctgaactctaaacaaaaatattagtatttttcttttacattgagaaagatcttgactatggttaattctatttttggaaatagagaaatctatatatgtatggttcttagtgttttaataaataaatatttggtgtttctaactccatcagcaacttcttcacaggcccaggtaattctctaatacactctgatgtttgatcttagaacctgttcaagtacatgaaatagaactatgtatgactttgtttgccttgtctactttctttgtaccttaaacattgaagacatctgtgacttatcttcaacatctcctcactgttttgaatttcttaaaccttgcagcaatgcagctcaacaagaacaatctttcgaaccctgtcttgatgtctatacgactgcaaaaaaccgctcaggtaacttgtaactacaaaacacacgtagttgtcagtttctcaatttcccacttgagcttaaaccagaaaactaaaccgttttctttgcttgtctgaggcacccattgatcccgagcttctccctgcaacttcattttagctcatgaagagaaaaccataaacttcacttcactttagatcaatgattctacaccggcattacttggagctgtttcttcaatgattctacaccaggtacttgtcttttgaaaatttatggttctttgcttgagatagacttgcatctctcttgataaaatccatctgctccaacccattgtcctgtgaaaagcccttagctaacttcctcgccttatagctttgcttttcaacaattcctagtattcctggtttccttagagaatctctgtcttcatataacgtgaggcccacttatttggcccatagagaaagaagttatgatctggtcaaaccctttcaatgagtcataaaccaaaagagagaagacgaaaggacgatgaaaagagagaatcgacctacacgttgtgttttcccaagtaattaagcgtttttgatttcccaaaaaaaacataaagcttttcatattcctctacgaaagaaactcgcttataaatatcaaacagagagagtggagtttcattttcttctcaacttcatcaaaaccctattttgcatttctcttacaataatcttactgatggctgattccggttcgcaatgtgtctttgtgaagactagtattgatacccgtttggggctactccttgacagtcatgatagcgtgtcttctttcaaaggtgactcttcataatctcttccctttttttttttttagtttggtaactttttgtagtaactaaactcttaaactcatgtttattgttgtttgtttattttacagacaaattctgcaaagaacacgaactgtgttttccaagtgttggcaacatcactgtttctgccttgaaggtaacaacactttctctaacaacacgtttttgttttggaatcaacaacgacaacaacttaaggaaggagtacttgtttttggtttgtaggttaacgtgagtggtaatgattatcacttgtccgattctatgatattgaaaaaagctcttcaaggcctcagtaacgaggacttttttctatccgttgacctcgtacgtgtccaggagaaaagtgagctgcagattggtgaagcagttgagaaaaaaacgaggaagagaaaatcgaaaagtgccaacaatagtagaaagaaactctccatagagacgccaacggaagcaaaaggtaacctttgttattgaatagtatataggagatctgcaaatgttattgaagagtatcggttgatttaccgttgtgttgttatatctgtttttcttaaggccttgaaagtggtgagggaactgtcactaggttggaagagaatcagaatatttgtgatgtagatcaagaggaacctgtcgatggtcataccatagatgttgaggccaagattgatctttcagggacaatcgaacaaggtaaaatagtttataacaattgttgagtgatgtgttccctcctattagatgttatagactaatatgtatgatttatgtgttcaatagacgacgttcaaaaggaggtagcaaatgctgatttaaacatgattgaccaagacaaggatcttgaaaatggtaaacttatgttctttttttttttaatattagtagaagtttttgattcttagttctagaatctagatgttacttgtgtacactagtaagccttgattagctttaaatgttgtagataatcttctagctgaattaaaccaaactagtgatgatgctgagaaagaagggatcataggtcttgttaatgctacttctgaagctattgaaaacggtaacttcagttcttggttgtatatacatactttttcttctctagcataataggcaatggatcatttctattgagtcgtaattgctgaattttgtgtagaaactgagatgagtgtcaaggaaaaagatggtgatgaggaggctaaatctgagaagcctaaaaagaaaaatagagcaaagaaagtcaagactccgactaaagaagatggtctagttgcttctagctcaaggaacgctgaggaagatggtgtctcgagagatccgcaggagaatgtggctaaagttgtgaagaagccgaacaagagatcgaagaaggaacagtcttcaaacattgttgaggaggatgcttaaggattgtgtgctatcacttatcaggatcattgatcgcttctctttatctcttcttttttgaacttttggtttttgtcttgggatttcttttggtttgtcttttgaacatttgatgctttatgtttttcccggtttaagcaacttatttcctctattaaatcatatcttttattttattttcatgcatgatttcatataggattaactgctgaacattccaccgtctacatactaatcaatcatagtagaaattgagctcatggatcttttagaagagactattttcttgagaaatgtgttcccactgtattattcttgatataggttgttctgttatgaggtctttgttgggcctgcaacaaaagataattcaatgcttgttccataacaatgattccttgttcctaagatcgagtgtcgaattcatgttgaatttgttcagttctttgaaattttagatctttatcaattagctttgattaggatttcttcaattaatcatcactcttgaataagatcttaagtatgatgtaattgttcgtctagtgtagagaaatagttcatttataagattggttcatgtttcatgtgaatttgtatattccattgccttaatgtaaaatcgtataatgatgattcaaaacccacatggattctgcatctgcctcagataaaacccacccctagattatcagtaggaatatggaaaaaaacatgaaatttcttaatttggaaagattccatggtgttgttctacatggcaaggaaaaagacatattattatgttcacagtactctgaaatccatagacaaagctagaagcgctttttttatgctcacattgtctgcaaataagaagaccaattaaagggttctctccaaaccaagaaaaaaacttttaatgctctttttcgtaatcgtccttggttccaaagttcttgcaccagatctgtgaaggaattgggcgtactggcatgtgtggcctttgctgaaatcagaaagggcttttctcaaattgtgaacatcaaacaagaagtggaaactatatagtagcacggacatacacaaaacataacaattcaagtgcagattttttgtcacaagggactcaagcattaggctacaatttataagagcaattgcaagtcttcaggcatttgcacccaaaccaagatttcagtgtcgaactacacattcaactgaattcttctcaaagaaccaggcaaactacaaaaataatcaatgaaatctcccatagctattacaaaaccatacaggctacaacacaaagtaacatggtgatgggaaacagggcttggggagctcaaagggtgcaaatctaaatcaagtcagagaaaaacatcacggataggttcccattttgcgagatattacacaatctatacagtcactgatacactaatgcccaatgaattaatggcaatgactaagaattccatacagaactgggtacacgaagtttgttcgtttcataaaaacacactagtgtacaacatataactaacgctatctgttagaatatcttcacacacactgcatggtcccaaacatccaaatttgcaggatgcaggtagcaattaatatctactgtaaaacattcaatagctagacaatcggttccttgaatcatccaaatctatttccacaaaccgataaaactattgacaaacatagaccaagaacaaagaagatgtgagggaagaatatgcgtagattccagtatcaacttccaagctattcccttctactcatatgttattcgtactataatgaagtattgaaggaccaaagtaatgaagtaatgaaggaccaaagtaatgaagtatacctcaagcttagcagatagcttggcgatggggatgcacacaaggaaaacgccgaacatagcaatggcggtgttccgacgccaatgtttgggcctacagttaggcccaccagtcatactccagactttggctctgaaatcgcctccttctgctccatgtccatgatcacctcctcccatttttcctagatcggatcaattacttccaccaaaaactgattccttttcctaattcgacaatgaagatagccagatcgatatcagtgacatagaatcaaaatgatgtcaaccctagcctccctaacatttaaaaattattacaaaattcaacaagtgagaattgaaatagaatgattccggcgaaccggtgatcagaaatcggcttaccttagtgaaatcagaaggatcgcaaagaagacgaagaagatgagacttcttctacttgttctaaagagttaagagggtgagcgaaacgagttatggcatttgtttgtaaattttctgaattctcagggtcttttatgtctcggacagtaatctttattttgggccttcaaaatccattagtttctcttaaggcccatttaaaaccatttaaagtttatttgagccttctaactctttttactttctcttaagcccatttaaagtttatgttgtccaaaaaacgacacgatgtttgcatcattaattcaacaacggtagacgtttttgtttttgcctgaagacgatgatggctggcgacggagcagatcaaagtcgacgctttttcgtggcggttcacgtcggggccggatatcatgcggcggctaacgagaaagctcttagatctgtcatgagacgcgcttgcctagctgcgtcgaccattcttcgtcaggtgcttatttgagtttcagtttcttctcatagcccaaatcgtttagaatctccaaattgcataccttgaggtttatctgttgaatttaggattctggtgaatgcatagatgctgtttcagctgccattcaagtcctcgaggtatttgttgggtctttgtcactgattaaagaagacatgttataactctgtagattttcttcagttttctaatgattcctatgtgaatctttgttgaattaggatgacccgagcacaaatgctggtagaggctctaatctgacagaagatggtcatgtggaatgtgatgctagtcttatggatggagattcagggatgtttggtggtgttggagcagttccaggtactcataaaagctctcatattaaccttgttcttatacttgtggaatggctgaagattttgtacgatgaactgtatgtagatcaggtgtcagaaatgctatcaaaattgctgctttgttggtgaaagagcagattactggctcaactctcttaggccgtatacctcctatgtaacgaatcactcttctttgttctgatatcaacccaaatttgaatcttgttttgtcgctagcgttgggttgaactttctgatttgcctccccaggttgttggttggtgagggagctcgacgttggggtaaatccaaaagtgttcttatacctggaactgtcacagaagctgatcaggtttgagatttccactttatctttgctttactgtcaatcacctgcttgttttattccttgagaatgatttaagttatttttgaacagtggctggttacagagagagcaagaaatcagtggagaaggttcaaggccatgctttctgaggtaggggcaaagagtattctctctgctgaagaacatcccagaggaaccgagaataatgaaacatgtgaggaaaacgtatcatcctgtgcagctgcagatgaggataagatcatggacactgttggcgtaatctgtgttgacaatgaaggacacattgcgtgtgggtcctcaagtggcggtattgcaatgaaggtaatatatcaacaaattcttagttgttcttttgagctgaaagtaaaactgatcttctctttctgatcatgtatttcagattagcggccgtgtaggtttggcggcaacatatggttctggttgctgggcatcctctaaaggaccatttggagctccatttctagttggatgttgtgtgtctggagcgggagagtatcttatgagaggttttgcagctagagagtgttgtacttcattggcactgtatatttcccttatctttcttagtttttatgcttttctcggtgttggttgttcttctgtaacaaagctaagaagggattccttatgctgttagctctcaggctggtccagcatctgctgccatgaaggttttacgttctgtaatgcatcaagagagttcaaaaattggaacagctgataaaactgcaggaattctagtagttcaggcggatgcttctgtggttgtaagtgcaaaattttgaagaaccttctcagtttcgtgctttcttttggtttagaatctaaaggtgattgttttgatttcactctaaaggtccctggaagtaagccggagctgaatgctgttgagatagctgctgcttactcgtcactttctttcggcgtgggatactatgggaactctatagagaagccaaaggtatagccttcctcttagatacacacagaaaaacttgtcgtcgttaatggtggagcttaagtttaggatcattgggtctcttgtttatccttggacagatttcgattctcaggacgaggagacagatgagtgaggctggggtagaccattttgaagcccggattgatctccgcccaacctgttgctgattaatttctgaagttttggtattttgtggagaaaagtttcagaatctgtaacataggagtcatgggacacaccaaaatgacttccaacatcaatcgtaatgacttcatccttaagctatcttccaagacttacattacgttaaaagatacatttgataaagcaaaaatgcttttgccaatcaccacagttgcttcatggtagttctactcccaaaatgaacaaaagctcacacacaaacttataaagatccaaataattatctagcaaagccgcaagataatcagggaactcacaatctggataaggtaacctctaaaatcaaagaacaagaaccgaaataatattatttctgacttaacgctaagcaaaaatcattggcttcaaaaaaccaaagtaagatttgtttatttaaaaaaaggcgagcaatcatctttgaagtcactggaagttgtgaattctcttggctgatgttaaagtgttggatagaagcatggctatggtcattggtcctacatcaccaggaacaggtgtgatggctgatgcaattttgctagcctccacatagcaaatgtctccaaccaaccgctctccaccggcagcacttggatcctgcaattcatattactttcacatactgtatttgatttgatcattcattatactaccatatgtcaaaaaattccactcacctcaacaggtttaatcccaacatcgatgaggactgcacccggttttatccagcttcctctgaccatgtttggtttcccaacagctgagattaggatatcagcttgtcttgtgagttcttcagggttcatggttcttgaatggataatgctaacggttgcatcctccttctacatttagaaaataaacatcgataaagaatgttgtcctaaccagaaaaaatggcatattgaagaaggaatcatcattacctgcagcaacagagcagctggcataccaacaatgttactccttccaataacaactgctcttttgcctttgaattcaatgttgtatctgtgcaacaactcgatgcatccttttggagtacatggaacgaataaaggttctctaccacgcatggcaagccgtccaatatttagcgggtgaaatccatcaacgtccttctctatactaaccgcattcaatatgttctgttcatccatatgctgcatatacacgacatcccaaaacaccgttgtaatttactgtttattttaagttatgatgaagaatatgaagatagactttgtttaccgatggtagaggcaactgaacaaggactccgtgaacagaaggatcatcattgaatcctgatacatatttcaacacctcttcttctgatgaatcttcagctagacgaacttggactgatttaattccgacggattcacaagctattttcttgttcctcacgtaagtagcggattccttgttcttttccaacaaggattactgctaaaccaggaaccacaccgattgattccttcattcttgaaacttcgattttgatatcatctctaatctttttggcctcagcctttccatcaattacaatcgcagatggagaagaagaggagcgaatggagagagtgcagcgccaagtagacgcagttgtccgtaagctgaattggctgacgctcgggcgggggaggaaaacaccattgcggttgtataaatggatgagacgcgacgttgtggaggaggagcaatcagtaaacatcatcgacgccatttgtttactaggcaaacagaagaaaacaaagtagattgtttctaagttaacgtgtgtgtaaaggtagatatagaagatatgtacttatcttaaatccattaggaattatctcctagaatcattattagtttatatcatatcataattatctaacgatttcatgtctgtagtaacaaaggaagaagactaagatgcaaacaaaaaaccacctatttttgttatccaaaaaaacatctttaacataaaacatatgaataaacgagaaagccataaaggttccaacacaaaaccaaaaagaaaaacataggcaaatgcatctctaaacagataaagactaaacatatttagccatcaaagatctcatctcatgcacaacgtcaatcttctgccacgtcgttttgagctcatcagcttgcatggacttcaccttttcttctatcctcttcctcttcttcaccggtaccaaactccaattcttcttccatgtctcttcatcaacccccggacccaattctttaaacgcaccatcaacaaacgacctctcgaaccaatcactttcttcatcaaccttaagcttcttcttctttggcttcacaagagcagtagcatcaccatcacttacccaaattatctcagccaattcgtaacacttcttatcatgctctgtagtagttttcttgttctcaatatactttctcttcatagaccggattttgttaacgaactgatcagtcttcacctcaaagctaatcgaatctttaagtttttcgaaaaagccattcatgtcctcggaaacattcttacctgtatccttagcaaatttgatcattccttgaagaaagacgatctcgtcttcatcagtccacaatctctgaaacaacagtggcttcttccccgtctctgtttcagtcttggctcgttcctcctctggttttccttcactttgtctcttctcattcgaagaagaaggagcagcagcagcaagagtcatcggctcagcttcagtgtcagactcactctccgatcccgactctgaatcgctggaaggctcatcttcctcctcctcctcagatgaagttgatgcgacggcttccaacggcttcttgaccggagatgtgacacccgacggtttcttcgctggagatgcgactcccgacagtttctttgacgtagatgcgacgtcagatgacttcttcaccgttgatggagtaaccaaagtcttgttcttggccatcggagagaaacgagagagaaatttggtagggtttttaaataaaaaattgagaagttggtcagttttaaggttttgcaccgaaaccatatattgcatttggttctttccttaattacaagtatcataaatctttgaccaattttacggggtttatggtgtacatctaaaattcaaaaagtaaatgttaataaatctaattttggtaactgaatttccgattggtatttttagtatattaaaaaaattaaaactaaatgctaactaatcgagtaatctttctttaattgtttaatgagatcaatgattcagttaatcagtaattactaatcgagtaatatcttttttatttaattacaattatcataaatcacattaattgttttgactaattttacggggtttatggtgtacatttaaaattcaaaaaaactaaatgctactaaatccgattttggtaactgaataccttcttttaattttacggggtttatggtgtataatactataatccctcttttgtaaaaaagaagaaagaaatttaaactctatagagtttgtttttggagcaaagatgctagagtttaaatttctttatattcttcagagaactctctgtccccaaaaaggattactgctaaaccaggactgattagtttctccattcttgaagtttcgactctgatctcctgcatgatacttagttccacagccgtttgatcaaataccatcgcctcatcagctgaacagaaaagtaaaatcttaagagttggatatctgaaaatacgtaagcaattggatgaaaaggtttagtctatacaagaggagcgaatggagagaatgtggccacgtccgggcacagtggtataagaggagcgcatgcggccacgtccgggcgcagtggtgggaaagcttgagttggctgacgcaccagcggggcaggaaagcaccgttgaggcggttcaaatcgatgagacgcgaggtcgtggagaaggagcaatcggttaacatcaacgacgccattattttactaggaaaacagaacagtggtcgtggcttcgagctcaagttagggtttaacaaaagtaatgtagaacaagtgactgtgttttcttgtttcaaattaaccttcgttgaaaggtagttataaataaagtataatgacgaagagaccgatgggtgaggctgggatatatcatagctgggataagttaaaactagttctgactcaaaataccaagaagagacaaacaatgttgaagacaatttatgtgacttaaaaactacatgttttgtttcatagaacaaaacgataactttctttaaagaccaaagtaaatcattggcttcaaaaaacagagtacgatttgtttgtttcccaaaaggccagcaatcttctttttaagtgacgtcactggaagttgtgaatcctcttagctgatgttaaagtgttggatagaagcatggctatggtcattggtcctacaccgccaggaacaggtgtgatggctgatgcaactttgctagcctcctcgtagcaaatgtctccaaccaatcgatatccacgcgcagcacttggatcctgcaattcatattatgtacatgtatgaatgttgcatactggttgatttgaaacttattatatcactgaattacgccatgaccatatgtcaaaaagaaaattccactcacctcaacaggattaatcccaacatcgatgaggactgcgcccggttttatccagcttcctctgaccatgtttggctgtccaacagctgagattataatatcagcttctcttgtgatttcttcagggttcttggttcttgaatggataatgctaacggttgcatcctccctctacaaatacaaaacacaacaataaagaccaaacatgtaactaactttcgaatgtcacaaccagaaaaaacggcatcttaaagaaggtatcatcatcattacctgcagtaaaagagcagctggcataccgacaatgttactccttccgataacaaccgctctctttcctttgatttcaatgttgtatctatgcaacaactcaatgcatccttttggagtacaaggaacgaataagggttctcttccacgcatggcaagccgtccaatatttagcggatgaaatccgtcaacatctttctctatactaaccgcattcagtatgttctgttcatccatatgctgcaacaacatcccaaaacactattgtaattcactgtttatttaagttccgaagaaagttattagactttgtttaccgatggcagaggcaactgaacaaggattccatggacagaaggatcatcattgaatcctgatacagatttcaacacctcttcttctgatgaatcttcagctagacgaacttcgaacgatttgattccaacggagtcacaagctttcttcttgttcctcacataagttgcagaatcttttctgtcaccaacaaggattactgctaaaccaggaatcacaccaattgattccttcattcttgaaacttcaattgtgatttcatctctaatcttttttgccacagcctttccatctattacaattgcgccaccctctgattttgtatcagctgtaccaaaaaaaaaaaaaaaaatttatgattccaacatgagaataaagaaactcaattttccagggaagaacagtctaattgtctacaaatttcaatcgatgtcaagttcaaatttggtgctcaattaagtcaaaaggtttaatcattaccggaaatggaagaaatgggagaagaagaggagcgaatgcagcagccacggccagaagcagtggtctgtaaacggagttggccgacgcattgacggaggaggaaagtaccgctgcttcggttcaaatggatgagacgcgacgtcgtggtggaggagcaatcggtaaacatcatcgacgccatttttatacaaggaaaacagaacaatagtctgctcgtcgtggctgagttaaaaaggaagaaggtaatggtggagacaggaagactaatgaagtcttttaatttgtgatctagagcaaagcagagcagagaagagacgatgaattgaagaagataacttcgtcgtctacggagagtcggagagactagggtttcttcttttgatatcaacaagggtttaagttcattcaaatcacaaaagaaaccggtttgttgatttcacctgaattttccggttttattataccagtctttcgttttcttttcttttttaataaatccaatcggaccgcttcatatttttagtagctttttaatttgattagtcgtcttaaactcagattaatcatgtaattaacactgatcaatatataaacaatacatgtaagttcgttgacttacggtctattctctatttgcggtctaaagtaccacactagatatatatacccttgtgatttaactcgagagctccaacaatcaaagctaaatgtactacaagtggtatcagagcaagtcatgttattgcgattgccaagattgttgaagggtgaagcaaaggtagaaagtacagacaaatagtgtcggataaatgagggatagattcacatattagacccaatatgttgaatacaaatattatttgcctttgtttttcccccagaggaaagaaactagagaaatttcaacacatcatcatcccatcaaaattttgagagtttgttactttttctccgctaagattcttcaaaataaggattttggtttctgtacagttttaagcaaaagaagttgaaattgtgtggtcttaccagaagcgagaaaaaaggttagatagcgagtgtgccttcaataatctggttatcgtcagatgtttcagatggtgatggtggttttggtttgctcgtacttcttgagaacccgtaacctagagagcttccacttgcctcacatagctgtaccatcataggatccattaaaccggagagtaagaagaattgtagttttttaaatagaccaaatatatacctcagctagttcagacaagtgacgagatctgaactcgttgatcgttgttgctatttctgatgtaggtaatttggcctgaaaaagaagccgacaagtttaacaaataccccaaataacattgttggtgacttaatgactacaagaattatctcttgtacctgtgcaagaacagcagctgctaactgaagacttggttccagcgtctcaggaacaacctaacgagtttttgtatcgagattttaatcagtttactttgaaaatgttgtgcaatgacagaaggagaatagaaaagttgtggaagttattacagcggtagcgccggctttttcaagattgagaccatgatcaacgtcatgtgcacggacaaaggttttgacattggggaaatatttgctaagagcccagacacacctgtaatttgctccaggtgtgtctaaagcaatagccgcagcacatgctctatctgccccgattttgtggagtacctgcacgtataggtaaaacaacgtcaataattttggatgatgtgtggttatacttttgacttgtttcatcagctttctactcttacctctctactaccagcgtctccaaaataaactggaagatctagggaacgaccaattgctactctatcactgtaaaataagagatttttggtgcgaaatgagacaaataaagagctggttagatacattgagcaagacaaggcaagcatgttacattacctgctgacatcgagggcaacaaatgggataagtctttcagaaagaagctgagcgattatctgcgtttaacatttagaaagcagcggtcaaagacgaatttaatcatatatcaccaaactattctctaaatcaaactatctaaacttctagaggagtttgttttcgcaacaaagtttatagataacgataccaacctgcccaattcgtccaaatccgcaaataatgatgtgaccctgtaaatcatccgtctgcaagtaaattcagaaagtaaaggatcagtcatttttaccccaagaatgcatgagcttcggaaggatattgaggtcaatcatggctttattgttttaaatttacaattgaaactaggaatggtgataaatgacttattttaaagtgttgtgaaggagtacctcgctttcaactggtaataaacttcgaacatcttgtaactcaaatcgagacgcaattaattggccgccagcagctaaccaaggagtaagagccattgatattcccacgacgagaaacagtaatgaagatagctgcggagtcattataccctggaagaaataccaatcaagccttagaggaaacatgggaataaagtagaactgaaacctcagctgtcatatccataaaacatgacaatatcgttttctagttttcatttaaatgactaattgtaaactaatagaactgcttgcatcatgatgtgagcctaactttccaaaaaataatagatgggaagcatcaaaaacaacccatatactctccaagaaacactgcagttactaaacccatcgtaaaaaagcaaaaaacagaaatcatcatatatataataacctgattgacagcttctccaaaagcaacaaacgcgaattctccacctggagccagaagaagaccgaccctcacggcagatatgattgaaatgccaaacaatttgcctatgatcaccactaatatagtcttgccaactaataagagtcctaaggtccccattatgagagggaagttggcgagaagaagttttggatcaatggacatgcccacctgattttatgcagctcgtcccattagtttcatgaacgagataaattgtactttaagagctggaaacaaaattagaatcttacaagagcatttaagcaggccataacacattacatatcctatatattccttaatatcctatttataataacttctgaccatctccaaggaaaacagtaaacttatcgatcagctattttcaagacctagttcacaaattaccgtcatgaagaagagtcccaacagaagaccacggtatggagcgatatctgattcaacttgcaaggaaaattcagtctctgcaagtagtagaccagccaaaaacgctcctaatgccatggaaagtcccgcctaatttaaagaaagaaacaatttatcttaacgaaacaaaagacaaagcaaaattacgagaataccaagcaccaacacggaaaatcaagaacataccctagctgtaagtaaactagtcccaagaataaccagaagtgtattggcggagaatatctcagcatttcggttttctgcaatttgcttgtatatcggccgcagaagctgtgtgtaccagaaaatcaatgcattgtaaaactatgattcagcaccgcagaagcagcattagctatagagtttcattatatgttcatgcaaacccattctatagaaaatctaatgttttctcatcacttatatggatctctcttttgttgtttaacttattcggatatgagtctcaaaacagaaactagaaaaccattgagacttacgagacggccaccagcaattatgccagtgatagcaactgctgctttgattgcagctagtccaagagcttcagcaatggcttgaaatccaatctgagaaaagtagttagcaacttagcattctcctcttacaaaataatttataggcttccttgagaaatatgcaagacagcaaatattagcaacacatgagcatgagtatttccttaaaagagcagaggaaatattgaacttacgccatctgccattacatcacaataaacacaacacaaaagggaaatataagtaaaaaagggaaacgttaaagctaagcttacccctcctttggatgaattaggtgaaataagtgggatgagaatcagtaacacgaccacagccagatcctgtgaagaccaacagattgaaaagagttacccagcatgatagcctttatacaagcgcagtaacaactttgtgttctgaacaaacctgaaaaagcaagaccgaaaatgtagctcgtccatgtctcgaggtgctctcaccccgttcttgtaaaacctgcaaaccgagtacattgtcttagttcaaccaattggtagctaaatcgcataaaaagctaaacgagctatcacaaaattaatttcataaaaacatagtagcactgacaatttttggatatcttcccaaaacacggtaacagattcacctagtgtaaattggtgcaaatttggaagaaggagactgaattttacctgcaggacaacagcagtggaagacaatgccaggccattgccaattactattgctgctggaccagcctgaccagcaacatagtgagtgatcaaaccaattactgctgccgttaccagaacctggattacaacaatgaaaaatcagataaaatgactaaactacggcaatatagacagaaacaggcatgcattgtagctcaaaaaaataaagagagtctcaaatcacctgcgcggagcctaatccaaaaacatatttcttcatggaactaagcctttcgacagagagctgtcagacaaatagaatcgaaataattggctcttctttccactaagcacatatcaaaggaaaaaggaacaacatatatatcaaatactgaagttaacctcaaggccaatgttgaaaagcaagaagacaactccaaattctgcaatggccttggttccatgcacattacgaattattgagagaccataaggaccaatcaagattcccgccgccaaatacccaagaacagggctgcctatagattgcagcagaagaaaccaacaagatagcatttaaatctctatgcattatgattgcggcaacagaagtgaaatggtttgtctgatgataacaatgaatagtacaagtccaaatgaaacaaggaggacaaaatatggggatttaaaatacaatgagtgaattaatatattacgttacctccaggaattttctgaaatagaggcacgaatatgacgcttgcaagcagtaaccacaacacatcgagaagggaagcttcctcctcattaacctaagtgttataaaagttggaggcagacagttaaattccataaggtatgtatgggactcgtgaaagagtacatttcctgcatgaccactcatacctcttgctgagggaacatctcaagtagtttctttattctctttggaagtttctgcatctgacggatcagaggttttgtgctggaggaaacatcttctgcgctagtgctgacaatatttggctgttgtggcagctgattgttccttcctactccgttggaatagattgccactctagaatgaatcagaaaacttgctattaaaaaaaaacagacaaaaaagtttatggtttatcataattcgtcaaaacaattgagtatccaactaaccctgccccaagaagtgtaaatccaagaattagcttaggccactgctgtttcgcagattcaactaaactctcaaaaactgttgcggttccatccccattggaagagaagaaagatgcaggaaagaaacgagaggatttcttcaatgatgtcttggtaccattatgagatgaactctcccttggcagatctttctgcacttcctgtttttttgtcagaacaacattctttgacttctctgcttctccttcagcctctttagcaaaatctgcagttggctttccgttctcattatctgactcgtaagactgagtcccaacatctgatgaaactccaactactactaagtctctttcagcctgatggcttacatcaacaatttcactcaagacttcatcctcaccaacaatagtattctttccatccaatacctttccctgggttgtttcttgggtttgggaaccaaaaagagtcttctctgctctttgcaaagcaatctctgcatcattcacacgttgagtagcctcaagctcaaatgccacagcttgttcggccaaaaccatgatatttgcaacatcctcctcggctttcaatgcgctgatctgcgctctctcggcagcctcattcaatctatctacttccttctgcagctcgtccttcttaacttgcaaacgcctgagttgttcctcacagcttgctaaattttcttggcattcttttatgtcagccttagcagataaaagggcttcctctttatctttaacaccatctctaacctcactctcttcagaagtattgtacccttctgcttctagtgattcaagtgcaacctgcagccttgcttcagccagagataatgccatagtagccttctgaacagcttctttagcaacggactcttcatcaacagcctcttgaaccacattaagtgtttggtttacatcgttccacgcactggctgcttcatccttaagtgctatcgctacctctgaaatcctctgagccttttcttcaaacatggtactgttgagactagccacttccaattctttagttgccttattcagtagatccctgagttcctccaaactaggtgcagaatcttgctctcttgtgtctttctcttccttagaaaacgtaacctccctgtcatcactaccttcagcaaattccaaattccggtcattcccaaccaaatctcctacagaatcgctactttgacaaagtaacctaaaccccagcggaacattttggggttttgcaggaagcaaatgaccgtaaaatcttccattgaaatcagcattcaaagtcaaagaagaacgatacgatacatttcgtttcgatctaatagctgagcgaactttagaatcaatcatcggatcccaaaatctagtgccgccgagtcctttgggacagagtttcgcacttatcattcgattcggcaagcagtaactcgcaaaatccgcaccaccgtgaaacatactctggcgctgaacgctagacgcaaaatccatattactgctgcagaaagacggagagaacaagagactgaccgatcataagagaagagagcttcaaggcttcagctgatgaagaatcaatggcggcgagagtgagtgagaatcgagtagttactgagaggaagatgaaacgtatctcctgagaaaaaacgtaagagagttccgtttcaacagtatttttctcggcggtcttcagattttccgtccaactctctctttcctctttcagtttttttttgcccaatcactcgtggtaggatttttttataagaaagttacgaaaatgccctctcgtgcttagagagattcaattcgtgcacatataatatgccgtgaatataccaccaactctcttactcgtactcgcatgtggtgcgtgcaatatacacgtggttcgaatcaacggctacgttttactgataggtggctcgtttagttttgcactgcctttgggtgcgcgtgaccaagtcattttccaaatgtgttttaatatttgtgaactattattaataaaaaagcgagcgacgttgttcgttgatgagggagcgaccgtacgcttggcgaccttctctgattgcgtagagtcgttttccttattgggcttacctagtaccgtcagcccacaatgttttcatttctttcccacctaaaactaaaagtactcacaagtcacaacttaaaccaagtacacaaggattttatcatgggattatcgtgtttgaagactaaaaagagcacaccatcacccccattagtgcaggtagagtaagacagtaacttttgggttcatattaccgagcaagaaccgttatttgtgattagacatgttataaaccactgctttagtgactatttaaaacaatatattacatgtcgtaatcatgcaacctaactatgttttcattaatcaaatacaaagaataaagagaaaagtgcgtagattcaattatttggcatagactcaaaagagtgtatatatatctgacttttattaaattattaaacacaaatacatattttcataagcaaaactataaaagccctaaacatataacgattacctcaaaggaaaaagtcgttttctcctaattaaaagataggttacttcctaattaatatataatttatgtgaacttcacaatatacagttcaataaaatttggtaatttgaccgatttaaggagagtggaaattagggcttctgcaatcttttttcttcgccgcaatctcatgtccaattatccaccgacggtggcggcgcaacccacaacgacggcgaatccactgctgcagcgacatcaatctgaacagcgacgaagagaattaccgaagattgtcgaaacagagtctacaagtatggacattacgatcggtcaatctaagcagcctcaatttttgaaatccatagacgaattagctgcgttttcagttgcagtggaaacattcaaacgccaattcgatgatcttcagaagcacatcgagtcaatcgaaaacgcaattgattccaaactcgagagtaacggcgttgtcctcgccgcgcggaacaataatttccatcagccgatgttatcgcctccgcggaacaatgtatctgtagaaaccaccgtcactgtgagccaaccgtctcaggagattgtaccggagacgtcgaataaaccggagggggaacgtatatgtgagttgatgtgtagcaaaggtctgcgtaaatacatatacgcgaatatctctgatcaagctaagttaatggaagagattccttcagctttgaaattggccaaggagccagcgaagtttgtattggattgtattggcaagttttacttacaagggcgtagagcatttactaaagagtcgcctatgagctctgcgagacaagtttcgcttcttatactggagtcttttcttctaatgcctgatcgtggtaaagggaaggtgaagattgagagttggattaaagatgaggcggagacggctgctgttgcttggaggaaaaggttgatgactgaaggaggattagctgcggctgagaaaatggatgcaaggggtttgcttttactagttgcttgttttggtgttccttcaaactttaggagtacagatttgctggatttgataaggatgagtggttcgaatgagattgccggtgctttgaagcggtcacagtttcaggtaccatattctgttctcactcggtgaatttcattgcaaaggtggttccttttgttgacatcatcgaccaacatcaagttccatctttgtttttcgataagcttgatggtataaactaggagagcacatcaaatatttagagtgcaatgactgattgagccaaatcctagctagaaattaatctggaaagaacttggaactctcaaccataggttttggtacgaaattgttgcttgtcagaaccaaatgataggctattgccttgaaatagtgtttcttgtggtttccaatattggaagttaaaatcatatgacttagctgttggatactaattaagcttaagcaatgccaactctaagaagtggtacttacacaatattctattggtcataggtatagttgaatcaagtatcaagcgtggaatgcatattgaagctcttgaaatggtttatacctttggcatggaggataagttttcagctgctctagttctaacttcattcttaaagatgagcaaggagtcatttgagagggcaaaacggaaagcccagtcaccgctggcatttgtatgaacccttcccttgcacattatgtacctttatgaactctttatcatcatctgagtctgaccattgatatatttatttctcaacagaaagaagcggctacaaagcagctagctgtgttatcatcagttatgcagtgtatggagactcacaagttagatcctgcgaaagaactaccaggatggcagatcaaagagcaaattgttagcttggagaaagacactcttcagctcgacaaagagatggaagagaaagcaagatctctcagtttaatggaggaagccgcacttgccaagagaatgtataaccaacagataaaacgtccaaggttatcacccatggaaatgccaccagtaacttcttcatcgtattctcctatctaccgtgatagaagctttcctagtcaaagagacgatgaccaagatgaaatatcagctcttgtgagtagttacctcggcccgtcaacatcttttcctcatcgctcaagaagatccccggaatatatggttccacttccacatggtgggttaggaagaagtgtatatgcatatgaacatctggccccaaattcatattctccaggtcacggacatagacttcatcgacagtactctccgtctttggttcacggacagagacatccactacagtactctcctccaattcatggacaacaacagttaccatatggtatacaaagggtttacagacattcaccatctgaagaaagatatttgggtttatccaatcaaaggtctcctcgcagtaactcatcattagaccccaaataggaggaatgtaaatttgtaacaaagctttttgtttttgcttaagttagtcatttatttaactcccaacagtctcaaaatttaatttaatgtttggggcttaagaatgcaaatttttttgctcctgtaattgacatttaagatgctaatgttattgcttcagaggttttagtcaacctcagatacatcgatatcactatctaaatagacctctggctcttggtcatctggattctcttcatcttctgtctctgttccttcttgttctcgttgcactgctcgagcaattgcggattccaaccttgtgcttacagtttcccatgacacaagcttttccatgaatgtatttatgtccgccttcttatctttcttgaggaagatgaattcaccgaagatccaacttgagcttgacaatcaatcaaatccgaaacagaaacagagctttttgacatctttgatttagcagtctttgatcttgaggaatatcaatgaacactagatacactcacacttgcaggctttaaactggattttaaacatgaatagaagcattgattccatggaatgtggtaagtgacatagctggacttcttaaacaaatgtatgaacgggtagggttcattacaatgtagttatacagcactgagatttatggaagaaaaaaaggacacagctttaactatctacagagagacaagaacactaaagacaagagaatcataagttcaggagttcgttaaaatggctctattcaaatcacacattggcacaagaccactaataagataccaagtgggacaatcgaaagataataagagatagcatatcagagagagagagagattttttgaggagggagaagttcgccggaggcttctgtttctagtcggcgttgtgattggaattgtttgagcggtctttccagtcccggaattggaaacaagagggctaattttggtccttttggaaagatttgaaacgacatcgttattaagccctaattctactataacgatgtcgtttacgagaaacatacatatacatacttgagaataaagcccattaccaagagaccaattttggtctttttcgtatagtattaactctacggcgattgatctaagcccaataattgtggaacttgctcgacttaggtctcaatctctattttctaccaatgccaaaaaacaatttccttacaaattttttatttttcccatcaaaacaattcccaccaatttacatttaaaaatcattgtaatctatcacatttccttacttttaaaaccatttacaaatctatttatcgccaaaacaaaaacgggaaaaatgtttttggaaaaaaaaaattgacagaaaaattattttcggaatatttttggcgaaaaaaatcgatattctattttgttaacctaaaatattttcaaaatatgagtaaaatagtcattaaaaattaaattaacgtataaatgaaaatgactaacaggaaaggttataattaaaaaatgataattttggaagaacattttttacaatttctctttaatcattaaccctcgttgtatggaactccggtggcgttgagccacgaatctctatttatgaactctctaaccgtaaacatgactgcttccatcgggtctgtgatgatcttgttcccattcggatggactctctggcttgcgtttgctctggggcctttgttttgatattcgcggtagaacaatgtggacaaatccccactagtgctgctatttcatggagtccatcccactggatctatcaaaacatccatttaagattccataatcaccaccgttgataaatcaccccacggtcttactagaaacatcttcaccattctgtgaatgtcgacgtgtcggtcgagagactgtaaaaagcctacgtattcatagaatttttatttttatttgtgatgtttatgatagttttttgttcactttattttttttgttcaatctattttaattttcttaacactgatataaaaaatttcatagtttatgttgtgtatttattttttaattttttataatatttaatttaattttgtcaattattgttttatttaatgtgtgaattaattttagctgtaatgttttgatttcaataaataaaatttaggcaggccacaatatgatgacttggatgttgatgtagacatcgtagatcgaaagtgaacttttctattatatagacgtattttacttattttttgcttaatttatgcttacttttggtcaaattattttctctttattattcaaattatttcaataatcataacatattggtagatatgtagtcgctataaaaaatttggatgtaaatgttaactgatgaaataaactaggcctaatttgtgtgaaagtagaaacctattaattgtgaaagtttgaaattccataatctcggtcgcatattgaatactcaacatataattttggtagtgtttgaagaatcatatttgagacataatcaggtataatgaataaaagcagatgacacagcaaacgaggaagatgtcatcacttgtcacaaatccagtgcatagatggatcaagtgcaattctgatgaagtataaaaacattagagaaatactctgaaattggatggatactctatgacgaccaggtggtgtttgtaacatcttgcatagcgttaatcttgagctaaaaacagctttagaagctgaaagatagatttttggggtcagactgaaaactttaattaagttagggtaaatatgtaaggaaaaggaagtaatgtgtaattttataaatttcagaaagaaagaaatgaaaacttaaaactccgttttaattaccacaaggctcaagcccaagcccaataccgctaacgaaatccgacgaaatcacaaacattataatattacatagagataatcatctttctgtctctctgtctctctgtctcacgcgagaactctggcttcgtctctatattattgacccttttgatctctctctgtctcgctttcttcctcgcgtggacctttttcgaaaaatatcaatcccagaatttcgcttcattttggattataaactcccagatctgctactctctatctccgattttgtgatttttcaaaccctagatttctccggaagagtttatttttttctctgtaactaaaccgagatttttttttcaaaattccgacattaccctaggttgtgtattaccgtagaaaaccctagttcctttttggtattcttggtgtacagatcccttccttagtcagagtttttggttattagtgtttagaggtttgtgatgaacaatcgaggaaggtaccctcctggaattggcgctggccgtggagcctttaaccctaaccctaattaccaatcacggtcgggttatcaacaacatccgccgccccaatacgttcaacgcggtaattacgctcagaatcaccaacaacagtttcaacaagcgccgtctcagccgcatcaataccaacagcaacagcagcaacaacaacaatggcttcgaagaggtcagatccccggcggtaacagtaacggtgacgctgttgtagaagttgagaaaactgttcaatccgaagttatcgacccaaagtgagtgctgttcaagcttggactacttagttaaatctgggatgtgattattttcatttgaagtgataattccttgtttcttacgttaccatggtattgaactgcttagtgttggtttcacttttgtgcgtttgataacctttacaatctaatttctcttcagctcggaagattggaaagcaaggctaaaactacctgcacctgatactcgatacagaacagaggtaatgttccatattttgacgaaatagagtaaattaggatgcattcactctttatttttgctgtttcgtgtgctatattggtgtgacttaaaggtgttcttaagcgtaatacctaaatacttgttaaatttgtttctcaatacttaaactgcgtgagaatctatttgtgaaactgaattgattcttggttgcatgggatgagatgttcacaattcgttacttgttatcatatttaggatgtgacagccaccaaagggaacgagtttgaagattactttttgaaacgggagcttctcatgggaatatatgagaagggttttgaaagaccttctcctattcaggaagagagtattccaattgccttaactggtagagatatccttgccagagcaaagaacgggactggaaagaccgccgccttttgtattcctgtcttggaaaaaattgaccaagataacaacgttattcaaggtaactgtgtactggaccatgttgttagttgattctttcacgtggtgcaatgctattaaagaatctgaagttttgacatcgtctagctagtgatttttcatagctaataagaacagaataccaaagctggcgtcgtaaatagattattgatccacaataaacactagttactgtataaaacttagtgaatgtaaatcgtaatgaatcctttgagcctctaaacccattgcttctatcagtagcctaatatgtttcttaaaggtttactgcttcctttctaacttagtttaccgtcaatacctttcttgtacgcagctgttataattgttccgactcgagagttagcccttcagacatcacaggtctgtaaagagctgggtaagcatttgaagattcaagtcatggtgaccactggtggcaccagtctgaaagacgatatcatgcgtttgtatcagcctgttcatttactggtaggaactcctgggagaattctggatcttaccaagaaaggtgtttgtgttttaaaagattgttcggtgcttgttatggatgaggtaaatgttggatgcttactttgtatttttttttctttgaaatttctttctatctatcttttttcactatttgcaacctgtagcaaaattgttcatgttactcccaatttaatttaattatggatcattcatcaggctgacaagcttttgtctcaagagttccaaccttcagtggaacatttgattagctttcttccagaaagtcgtcagattttgatgttctcagccaccttccctgtcactgtcaaggattttaaggataggtttctgacgaatccttacgtcatcaatctcatggatgaacttacgctcaagggtattacccaattctatgctttcgttgaagaaagacagaaaattcattgcttgaatacactattctccaaggttagatctgaactacattgattgtttttgtttctttccttagctggcattttactctcttcttctcctgcagctgcaaattaaccaatcaatcatattctgcaattctgtaaatcgtgtggagctcttagccaagaaaatcacagaacttgggtattcatgcttttacatccatgcaaagatgcttcaagaccaccgaaacagagtgttccatgacttccggaatggtgcatgccgtaatctcgtgtgtactggtatgccttagtgttatcatgctgctattgcaggagcacaatgaatcaaatactaaattatctacctcttagaccccaatagtggctttagttgaggctttagagggacaacttatactggttttaatattttgactttgcgaaatcagctatgtcctctacctgaatagtttatgatttaatgatggttgctgcagacttgttcacacgtggtattgacattcaagccgtcaatgtggtgataaactttgatttcccaaagaatgctgaaacttatctccatagggtaagctaaaaaccaaatgtccacatgatactagattcctacatgttgattgatggtaattgattttaatatctggtctctgttcaggttggacgatcaggaaggtttggccatcttggtctagctgtgaatcttatcacctatgaagatcgatttaacctgtatgtatttttctcttgactggtttgtactattgttttctacagcatagaataacctttgtgttacatttttgtagttaccggattgagcaagagcttggaacggagatcaagcaaattcctccacatatcgatcaggcaatttattgccaataaccaagggtaaaccaccttggtctgctgttaggtgaatcagtaataagtggtacgtagtatctacttatggacaggcttgaattgttcctactttcggagtcacttacttcatgtaacctcaagattctctaggataatttgttttaatgtatacacaatacagagtcttgttggaaagatcaaagatggaatttcaactatcgtaatcataacaccacattacataattcaaggcatacattaagttacatatttcgaggacataagttcatatggttgatgcatataggcctattcattgttcttttgccacttacgctagaaaaattcttttgatttgggtttgcttcctcatttaagaggcccctaatatattatttggatttgtgcaatgtttcaggttggttgaagccatggttagacagttgtcttatctagccatgcaggacaaggacaacccaaaaaggcttcacattctgcctcttacctccataatgtttttttctgcgtctttgggattcctttatttttaaagattaactatagtcaaggctaaaaggtttgaaataccgggtagtattacaaaagtgaagtcttttatttagttttaacaagtcgtttgagctattgtttctttctatgccgtagactgatcagtggttacagtgttgtgatgcgtcttcaaggagctgtggtttcatgactctttcatgatccttttccagctttccaacttcaataataagtctttgagaccttaagatgagattttcctttttttccatttacacaggttgctgattttattttagcatgttttgtgttgtcaataggtagattagttcaggatttggtctgtggacaatggacaatgaattttgcactctcttgttttatgagcaacacaagcaaaacacacaacatacaaaagatacaagtatgaacataggataccggagataggtgataatctgtatcacaggttagtgctgatctcagaagcagctcaaagatgacttcttgggtatctttcctgcggcttgaaacctagcagcagcttcttccgcatcaaggatctcttgagcccgtctggtttgaacatctgccttcttcttttgtgcctttgcatgaactgccgctttttcgttccttagtttctcagatttctccatcttcttactgtccatcttccgctgtagaaaacaacaattttttcgtctgtatgttagttctttgacgacatgaaatgtcatgtttcatagtcttgtaccatttggttaacttgctgtttagatagattcatgtttttgatcatacactacaggctacagcagtagaacagtcttaagcatacatgagtacatagatcatatattaggaattggtagatgtcttttgtggaatcacctgaattctagcgagttcagattcgatctttgtagttttctttttctcccatcctgaaatatctagtagcttcttctgagtcctgcaatcagagaatctgtcacagtggtactgaaacgacgctgaaaagtgtttgtgttgtgacttacttgttattgacctttgttatctttagttccttccatgccttaataacttttgactgctcatctcctatgtggtatgtagtaggtataaactaaaaattaagatacaacatgaaactaaacaatactaaaactctgtgatatgagttacctctttggatcggaatatttggctccatttgattgagaatgagtttcaggctttaagttctagttgctagttaaatgcacatttaggtctatttatagtgatgtaacacacatgttcgattacaaaaggtgaaaatttggaactgtcggtttcaatgcattggtgtcgttttatgtcttgagggaatatttgaaaaccatcgttcgttttaaattaatatgtcgcaaggaataaatatatcacaatgcttgcaagctagcgaatcttgatatgattggcgagcactaagtgttgttctaattgctcttagtttataatttggttagtttttataatcctttcattgaagaatggaatcccccatataaaaaaataagatgcatgtgttcaatatatgccaaagcattccataccaagtccccactatggagtaatttcactatctaatatctatctttgcaaaataattatcattcttttttttctttcttgtgaaaaacaaaacaatttaaagacattgaatccacacaaaatgtaatatagcggacaagcaaaagcagaaatggtccaagaaaatggcatgttaaagcttaacaatttgaaacgaataaaggatgcattagaatgttgttgttgctcagagattgagtcgtcctttgatgatgtcaaggctcatctcactaggatcagttgcttgcaattcaacttgaattccttccatttctctcttgaacctgtcttttgagcttgcatacaacatcttactccgaactctcgatgtatcaggtgacctgatcaatacaacacattcatgagcatttgagatcatgtggaaaaaaacatgttaaggagagcaatgtgttgttaccacgcgatgaaaaagatcttgctcttctgacaattgtcctctgtggtgaaatcaaaatcgtagacagcgtatcggcattcgtcatcggggatagagctggtaaaatcgtcgtaagtttcttctggattcccaagcttttctatttgcacttgctgtgccttctcatcaattttgaacacaatgaacctgtaagtcctctttgctttcaactctaagaacttaatcttgcattcatcattcacatgcatcccagacgctgaattagcctgcacaacacacacacacacacacgtagtcatttatttatatattaagctgtttccattctatacatcttcctaaccagttaccataaaacttagattgtgatttaggatcatagcatataaaccatatgtccacaacatcattcttaatgaagtcaatatatacatgaaacctattcatgtgttacacttccaaaaccaaataacacaaaaccatatatattcaaccacaccatccacatataaatttcacatgttgacaatcagaacataaacagaatcaatgcatcatcatcatctacatcagaagattaaatgtaggaacttaccatattttctttggagaatcgaactctaatcttgtgtttgatgattgggaaaaatgaagaggatagggaagagtgaggaggattgggggggtttatgaggttgaggaaaaacacaaaagttgggtaatatttgatattttcttttggtctttaggctgatcacgtcttgaaatagatgactttgatgctatcacgtcgtgcccatttttttcaaacctatatatagttttaatccttgataatacatataaatctatatttatttgtgtttgttgcatatgagctcaactttggtcgggagatcattggaccgttgaagttttcatgatgaacatgttatatatatttttttctcttctatatactttgactttagcctctatgctaaatattgttttatgcggcccaaacgaccattgaacccataattgggccttgttcacttctggcccaatggcctttttctctcttttccttcactactattcttcttcttcttcgttcttctacactcgagcgcgcctcttcttcttccttaaacacacatctctctacacttcattttctcacctttctcttctgatttcacttgtacacgattaagcaaagattcaatttccaacattgacgtttctctcgagtgggtgaagtagaagaaagttatgtttaaaccctaaaatatttttttcctgagaagtcgatctctaatggctcttgtacccaagattcgcaatcgcaccatctcggacaaaccagtctcttcgtcttgtactagaacatcgagtttcagacaaagacttctcgccagttgcaaacgatttctcaggttcaaattgttggttcgtgcttcttcagtgtcattaaaaaagaaagcagcaaggtgttcacaatctcaacaagttgttaaacataatgatgataggattgaggaacattcttctagtaatcggggttttaaagatggcaacaatttcttagtatcatcaacagaaacgaagaagcttgttgcggtactgattctaattaatatattgtatcaatgtttgtggatgcaatgcaagattgttctgtttcattgatttagtaagagagctcttgtattgatttctgttgaagttttgtggtgaacctttccaaccactcaacgaggaggaagtagctctagtcaatagtgccttgtctaagagaaacaggttttttttctttctttcagaattagcttatcatgtgatttgacttgattgagaatttaaccacttgtgttgctttgctatctcagaaagaagattttggtttcgcataaaaactccaatattgacatctctggagaaactttacaatgcctaaggccgaatcaatggcttaacgatgatgtaggttaagtcaagagttccttatgtgttttgtttgcaggaatcgtgttttattttcttctttgttttatatttataggtcactaatctctatctggagttgctgaaagagagacaaactagagatccgcaaaagtacttcaagtgtcatttcttcaataccttcttttacgttaaggtttgctttctcttttacttgttaaaaatagatttcaaaggtctatgtttcctcatgccatgacttactttacacattttcagctcgtaagcggctccggttacaattacaaagctgtcagtagatggactaccaagagaaagcttggatatgatcttattgactgtgacatagtgaggtttcctctttttgtcagaagtatatgtatagtccaatttgattgatgatgaacttgtgcagatatttgttccaatccacatagatatacattggaccctgggagtgattaacaatagggaacgcaagttcgtgtatcttgattcattatttactggagttggtcatacaattttgaatgctatggtataacttcttcatcatagaactctctgtccatttgcattttggagattatggaaccagtgttattgttttaggcaaagtacttggtggatgaagtaaaacaaaagagtcaaaagaatattgacgttagttcatggggaatggaatacgttgaagaacgtcctcagcaacagaacgggtacgtaattctcattttgctatgttattgatctcacttgacactagtctgttcgaataattcgcaggtacgactgtgggatgtttatgcttaaatacattgatttttacagtagaggattgagtctacaatttagccaggtaataagagatgtcatcaaggtctgtgtttgcttatgaatctgtaccaatactgttgcattttgaaatcgagaaatatcaaattcctatccggttcaaactagaagaaacattacttaagcacatgagacattattggtcatggaattaaagtaggtgttggtgaaacatgtattaagagggatactataaaatatgttcatttcgtctttaattctatcgtttgcagaaagacatgccgtacttcaggttaagaacagctaaggagatactgagactgcgagctgactaatagtgcccccatcttggtgacataaccttgctattttacaaagccgattcatattagtttagcagccttatttgcttgggctgtggagaatgctagatatcttcgttgctttcttgaaatatttgtttgattttttcttatctagaagaagttgttgataagcttttagaattctgttttattgtttagtgaaggaataatcttcaattttgtaccctggcctgaggaataattttaagtttggtggaaaattgcagattgttatgcaactcttagtctataccataagataacctcatgaatgaatgtggtaatagtggttgcagagcgtgtaattacaactgctttgtgttctgttgtttagtggaaatatgaatctccattttggcttgagtaattgcatattttgtgatgtatccatctctctaagtctctagactaacctgaggtgacaaacgcagcgatagagtcgctggataaaatgcgtaaaggaagtaagaaagcagcactgcagatggttgacatggaatgcagttacctcactgttgatttacaactcttatgcattgtgtttggtggataatgcatatcaaacgtgcagagagtactgatcagtttacaactcttaaccggaaactgagattctcggttcggtttaaccggtttctaccgaattcacaggactacaaatattttaagttaggtaagggaaaccaaaagtccacatgtttctgatccacgtcagcatgaaattctaaacgacgtttcagcgtaattcatcttctcttgtataacacttccgattctaattagggtttatcgtttgcatcgctcttgccactacctccggagtctgtttcatttgtttaaggtgagtgaccacattgattttagaatgattatatatgtatggtttgaattcttgcttacctcttgttagctaaggttttatcttaaccattaatttagtaatataggattcttgttttcaaacagtgaatggaggaattaagccaaatcttgaagaacaataggaccgatgatctcacttggttttgctctctctcagaatctgaactggtaaatatattgtttaatcattctctttctttctgcagtcaaaaactaacattgatcaatcattttttcaggatttgctcatcagcttaaaaaagctagtcattcgacgtgccaaagtaagtggtctcgaagatctagtagctgacaaatttgatcttaagatgctccgatctctcggttatcttctaacttccgacactttttgtttttttaaatcctgaaatctgttattgtgaagctattcatctttgatcttgtgacacaatcatatggtatcttgcagggcttgtgctaatggagtatgtaagaaaaagagtagaagatgatacttctcttgccccaagtgttgtccaagaactcagccttttggatagttgtaacttgttgaaaacgcatgtagatgatactgtagacattgaggagattctgactgatatctgcaacaagaagtcaaaaaagaaaacacggaaaaggttgtgcttggtacatagtctaaagagttaggggaaggacctttggataatattccatgccaaatacttatatgcatttctttcgtgtttgaaggagccggtaggaaccagcctgctgcgatggacaagtaacagtgagagagggttgcaaaaccatgagacaacagtttttccatacaaaggctgttggaaaatcaatgtacgttactttccttgcatctggttccgactattcattttcatccactccaaaattattgtctgttttaagcatcttttttttttttttttcggagagggttttaacatctttgcttgttagcgaacatctcttcttctttttgctattcatgagtatgttactcatacactcaaaaatatctaacgagtgtaatattatgtattagcgagtgttttacaattgactgcatgcattttagaattatatcttgattgagtgaacaaaactcaaaaggtctaaaaagaattagttcgaatcggctgaaaacttcgagttccggtttattaccggtttacacttaaccaatctataaattggtaagcaattctatcgactaacataaacccttgataagttaatagattattgtttatacgtattcctactagagacgtgttgcgaaagtgatacgtctcctaattaaagagaaaacgagatttaatcgttattaagaagaaacttcaaagtctttcatggatttttagactctgaagtagacgcttttgtcttctctgtacgtatataatacgttcttattttgacttttatttggcgtttttttccaatttcgttttaaaaattccaaaggtagctaacttttggcactcaactgcgacaagctgttcaaaaatgatacatctgttacatatgatttattaaactaagacatttttataatatatgtattcagatattgattataacgtccaaaagaaaaacagagatgctctgatttttataacccaagaaatacgttacctgacgttaataattgcctaacaaacgattaggcccaacaaaaaaacgtcttataagttaaaactttggtttgggtcaatgcttcatatgattggtcctcagttgggctacaaaagggacacgtgtcaagatcagacggcggttctcaaagcaacccggcaatttccatggaaacagaggtatgaccaacatagtaagtaccgtagagtaaaacagaaaacgaactcacaaagaaaatcttttaacacttgtttttatttgccttgtttttctaagaaactaagatttgtttattcgtttaactggtttggtcacgacaggtgattgatctttaaaggcgagttacgtctttttggttctcgtcttctgtttctgaagaggcaagttctctttcctccctttttggttactagctctttcttgttcttgcaactcttattcacctcttcttatagaagtccatggtttttcgtgtttcagagttttctctaacttagaaatctcttttcctctgcagttgtctcttcttgccttctattgctgataaggtgttttgaaagaagaaaaaaagcctaaaatgagcaatataaagctaggagttgaagtgataagcgcacagggtctgttacagagagataagcataactcatgtagccctttcgtggagctcaagttcgacaaccagatattccgcgcaacgaccaaacacaacgacccaaatcctgtctggcacgagtgtttttacttcgttgtctctgacccttccgtcttgtcaactcgtacgcttgaagcccacgtttacagctaccagaacgaattcgatgctaagccctttcttggcaaagttcgagtcaacggaacatcttttgttcctcgctctgaagcagctcctttcaattaccctttagagaaacgcagtgttttctctcgagcccgtggagaactttgcttgagagtttttatcacagacgacccttctgttacaccttctgtcccaaccccggttccagaatctcctcaagcttatagcccaagtccgcgtaaagaacatgtgaagtccttaatcacagccgatgcaagtatggctactgatgagagaagagagctaaagcctaaaacacgtacgtttcataactctgcccctttagtgaaacaacagccaatgatgaactatggcatccacgagatgagagctgcaccgatgcctccaagagtggttcaagtcaacggtccaggtccatccttgcaccagctgccaccagatttctctgtcaaagaaacaagccctttgctcggaggtggacggatcgttggaggacgagtggttcgtggtacagagaggccaacaagcgggacatatgatctcgttgaagagatgaaatttctctacgtgagagttgtgaaagcgcgtgatctccccaacaaagaccttacaggaagcctagacccgtatgtcgtagtaaaaatcggaaacttcaaaggtgttaccacacattttaacaagaatacagatcccgagtggaaccaagtctttgccttcgctaaagataatcttcagtcgaactttcttgaagttatggtcaaggataaagacattctccttgatgattttgttgggatcgttaaattcgatctccgtgaggttcagtctcgcgttcctcctgatagtcctttagctccccagtggtacagactggagaacaagagaggcgagaagaagaattatgagataatgcttgctgtgtggtctggaactcaggctgatgaagctttcggggatgcgactttctcagactcattggtagattcagacagctccaacattatatccgctaacctgcgctcaaaagtgtaccattcgcctcggctatggtacctaagggtgcaaatattggaagctcaggacgtcatcatcgtgtctgacaaatcccgtgttccagaggtctttgtgcgagtaaaagtcggtaatcagatgttaaggactaaatttccccagagaagcaataatccaaaatggggtgatgagttcacgtttgtagtcgcggagccgtttgaggataacttggtcctctccgtggaagatcacactgctcctaacagagacgagccagtaggaaaagctgtgattttgatgaatgacatagagaaacgtatagatgataaaccttttcatgaccgatgggttcatcttgaagactccatctcagacgctatggatgttgataaagccaagaaagtgaagttcgctactaggctccggtataaggcggttctcgatggaggctaccacgtttttgatgagtccatgtataacagcagtgatctcagaccttcgtcgagaaagctctggaaaccagcaattggtgtcttggagctcgggatacttaacgcaaatgtgttccattcgatgaaaactcgggaagggaaaggtacttcggacacgtacgttgttgccaaatacggtcacaaatgggttcggtcacgaactgtgatcaacagcatgaatccaaagtacaatgagcaatacacatgggaggtttttgatcctgcaacggttttaaccatctgcgtctttgacaacgctcatttcgcagcaggagatggcggaaacaagagagatcagccgattgggaaagtccgcattagactctcgactcttcagacgggccgtgtgtacacgcatgcttaccctttacttgttctacaacctactggtcttaagaaaagaggagagcttcacttagcggtgagattcacctgcacatcggtctccagtatgctgatgaaatacacaaaacctctcctgcctaaaatgcattacatactacccttatccacaaaccaacaggaagctcttaagatgcaggctatcaacataattattgttcgtttaggccggtccgagccaccgctgagacgggaagtggttgactatttgacagattggaaaagtcagctgttcagcatgaggagaagcaaagccaacttcaataggttcacgacagtgttctccggtgcgctgtctgtttggaaatggatggaacaagtgtgcacatggaagactcccgtgacgacggctctggtgcacgtgctctacactatgcttgtgacgttcccggagatgattttgccgactgtgtttctgtatatggctgtgattgggatgtggaattacaggtttaagcctagatttcctcctcatatggacgccaaactatcttatgcagacaatgtaaattctgatgagcttgacgaagagtttgataccttcccgaccgtaagggctccggacattgtgaaaatgaggtaacaaaaatcaagaatgatcaaagaaaatcgaaaacgaagaaagacttggtcattggttgatagttttcctccctcatatttttcaggtacgaccggctgagatctgtggccgggaaggtacagtcggtggctggagacatagccgcacaaggagagcgagtgcaagcgttgctgagctggcgtgatccacgcgccaccgcaatattcgtgacgttctgtttcattattgccatggctctctacattaccccttttaaacttgtcgctctgttatccggttactacttcatgcgacatccaaagctccgacaccgcattccctccgctcccgtcaactttttccggcgacttccagccatgaccgactctatgctgtgaatcttcttctggatagagtaatcaacaaacatgccatgtatataactctcttctttgaatctgtatctatctatcgatatgcatctatatgtgttgacaatcatgcgttcgtgaactcgttctccgaattaacaatggtgatcgcaaacaaactctgatgatcaaatcaaataaattgcttccacactcgcaatgttgaaacagagaatctaaaagctcaaaacagagtcggttagatcctaacaaactctttaaaccttctccaattcgcaaccaaagctaaaccatcgcttccacaaaactaattggtcgataaccagcctaaacccggtttgatttaagctgaaccagatccgtgtgatcaatatataaaaagcccatgggccttgaacaaaacaacgtcacatcggtgattaacactgtttttagtgcttaattagttccctccctgattacaaaagtccgttagtgattacggcatgaagagacaacgggaaagaggaagaagcatatctctctctctgtcttgttctatgaacgagaccacttgctttaacaggcggtgctaattattttccagaaaataaaaaaccccaaaaatctgtacgacaaacaatttattaatcaactctttttttttctttctataaggttaatggccagattctttcttctctcacacccattaaaatatttcatcaacttgtcggtaaaattaattcttggcttattctatctttctttctctgtcttcttctttcaatttttcaataacaataatacagatgtgtatacattagatacacgtatactagtactaaacttcactgtgtgatctgatctagagtttttatactatcagaataaataatagtcgacaatttgggatttgtttatggtttacttcacatgaatcacatacgttcatgtcgattcctttgagatactgtctcgatttcgtttttttctcttgtttaatttaaaattattgtaaagcacgtggatttgcttgtcttggttttgttttctccttcgacctctttgatgaaatcgaggaacctacaatttcttcgtcgatccaaatggtagcttagtggtggtgataataggtttctcctcttgattggctccagctttaggtttttttttttatctttgtttctgcttcgattcccaaaatttaccctttcgattttgagtctaactagtcgagttgactcagtagagtcgaaaggtacgaccttttttctctacttcactgattttgaaactattgaagatttgatttggtaagatcattcattggctgtataattttattgcagcttctgggtttacgaagagacatctcctaattgaaacaaaacctttcctttccattgggctgagaaaaaagcaagagtctttgaatattttttggagcgtggttttatttagatgggaggtcaatgctctagcctgagttgttgcaggaacacttcacacaagacagctgttcttgaagctcctgatgttggttagtttctttaagacaatgaattagtgttttttctacttggatctaagaagctataagacattgtctgattgatgcagataatggagagagtagtgagatcactgatgttcctaatttccgggagtatactttagaacagcttaaggcagctacttctggttttgccgtggagtatattgtatctgaacatggagaaaaggctccaaatgttgtctataaagggaaattggagaaccaaaagaagattgctgtcaagcgttttactagaatggcctggcctgattcacgacagttcttggtatgttcttatctttggaaattgtagtttgtttcatctctttttattttgatgttgagaatgtgttcttcttccttgtgcaggaggaagcgaggtcggttggtcagctacggagtgagagaatggccaatttactcggatgttgctgcgaaggtgacgagaggttacttgtagcagagtttatgcctaatgaaacactagccaaacacctttttcactgtgagaatcatttttcctatatatagcctttcatttaataatcttgccatgctagtcttggaagttatggtgtctaagtgtactttttatgctactaggggaaactcaacctatgaaatggactatgaggctacgagttgttttatatctagcacaagctcttgaatactgcaccagcaaaggccgtactctttaccacgacctcaatgcttaccgggttttgtttgatgaggtatttattagttatatataagcagtttttcctctttcttcgaaacctgtctatgtttctatgctattccttcattctctgacgccttaaggggcttttaataaggaatgcaatccaagactatctacttttggcttgatgaagaatagtcgggatggaaaaagttacagcactaatcttgctttcacccctcctgaatatctacgaactggtacatcattggttttttctccaagattcatatggttgagattaagttgcacgttctgtttgttattgtatttacagggagaattactccagagagtgtaatatacagctttggcactcttctgcttgatcttctcagcggaaaacatatacctcctagccatgtaagtattttagccataataagtttgttttccatacgagattgcagcttttacttgaaaaggtgaaggttgattctttcaatctgttttatacaggcccttgatctgattagagacagaaatctccagacgctaactgattcttgcctagatgggcagttttctgatagtgatggtacagagctagtacgcctagcttctcgttgtcttcagtatgaagctcgtgagcggccaaacaccaaatctttagtgactgccttgacacctcttcagaaggagacagaggtttctattgatttccgagccattagaataacttggaccaagtttctttttgttaactcgagataattttccttgtattgtaaattgcaggtcctgtctcatgttctaatgggtctacctcacagtggttcagtctctcctctgtcccctcttggtgaggcttgttcaagaagggacctgaccgctatgcttgagatcctggagaaacttggatacaaagacgacgagggtgtcaccaatgaggtaccttttcagaattatgttggaagaatcagtggtttggctctgttaatcagtgaatagtttctttcttggttcttcatggtgttgcgttactttggtttggcaatgcagctctcgtttcatatgtggacagaccagatgcaagagtctttgaactcgaagaagaagggtgatgtggctttcaggcaaaaagactttagagaggccatcgagtgttacacacaggtcgagttttgttttgtacataaaatgaagtagacaaacacatagcattagcctgattatctttcttgaaactttgacagtttattgatggaggaatgatctctccaacagtgtgtgctcggcgtagtctgtgttacctaatgagtgacatgccgaaagaagctttagatgatgcaattcaggctcaagtgatctctcccgtgtggcatgtcgcatcatatctgcagtctgcttcccttggtatcctgggaatggagaaggaatctcaaatcgcactgaaagagggctcgaaccttgaagcaaagatgaatggagttccccgagtgaagtaagatatatagcatttaagatttttcttgttgggaaagatgaaagaacatcttaccaagtaaaaggggtatgaatcttttgagcacaatgatgggaaaacactcaagagcaatgcaaaactatagaccctcttcttctggttgtatgaggtgttttgcccttcttgtgcctctttttatgggcattgaattgaaggagtcatttcctttattagctttgaaatccatttcctgaaactttattgtactaaaaaacccattattgcagaaaccaaaagagggttttgtttcttttgatctataggtcacacagactaaacatgtatgaactcttgtcttttgactaaagagatattcgacagtgaaaggggtttttgtggttaaattccaatagttgagtaaattattcaaaattttaaccaaacacaaattcgtgtcaaagttacaggactttcgactcctacagtatagtttaattactcgtccgattgtgaagttagttaactcttcattcatcttcctcgcttttcaactttaattaaacaacatgtgcatttcagttaaatagcttacctggaatctgtgccagtcctgagatacaatagaaaaatgtcgttaagagtttatttgttcacccaaaaaccatcttagagaggaacatgaaacggaatcttagcttgcaatattagggcaagggaaaatgatcttgatggattacaaacacataaaaatgatacaccaaacatataaggggggtcagatttgtggaaaaaaaaacaaaaaaatgaaagtgaaggtgaaaataacaaggatagcaaattgagagaaaagccagtcagaagaagaagaagaagcttcatgaccccagttatttcacacctcatcaggtcccggcgtacagatttccaatctctcctccggcgacaaaagcttggaagcagaagtggttcaaaattgatgtacacactgcagtaaatagagggagagaaagaaagctggatttggacacgctataaatgatcctaagagctacttcccgttccctggcaatgtgctggaattagacgctgtcgcagctctgttgatgcacccgcaagttctgaatagtcacatacaatggcaacaaatcaatgtgacagaaccaaatgtagacccaatccgtcaaaacatttcttgtattctgctgcaatttctactcttcacatatgattgtgaaatctaaacaaagtcggctaatgataacttcacagtttttgtaaggatgaagctaaggtaaaagataatatatgtactgaccttgggcagtgaagttaaacaatggaggcagtgctcttccatttggcagtgaaacatttggatcccgtaagtcatcaaagaaggggtgtgcacaagcttccaacttaacaaatggaaaaaaagtgttttgtagaatttgagttagaaaattccaaatcagccaaggagattatatagttttgtggtgtccagcaggatttagtcttactgcagtgcaacgaaggtttggtgagtactgaaggagtcttgagacgaggtctactgcttcaggtggcattcgcttgtggaaaatctgaagagttatatgctacattaaatttcatttgaacaagcacacgcaccaaagaggcacctgcgattatttaacaaaccttgtgccacgggtgagctttgatttgaggaaacttgaactctgtgtaattcggattcatacaccgtatttcttctcttgtaggcgtcccaagaatctggtagatgtacagatgagtaaactagtaaattaaatatagaagagagatgaaggaacacgagggatcaggttaagtaccttgattatctccaccagctgatcaatgccactttccccgggaaacagtggctacgggtagaaaatcaacagttgttatcagattaaatgttatttcgaagtaataatgaaaactgatcaatcaaaataaaatggttcatcataaccgaaactctacaatgtataatatacttacttgaccaagtaaaagctctgccatgacacaaccgccggaccacatgtcaatggcattggtatactctgtcgccccaaatataagttctggggccctgtagtaccgggagcatatataggatatgttaggttcaccgggtacctgagacgcaaagggtgttagccatcattattcaaatgataactcatctccaagaactcatcaaaaaaaaatgaacataccaacatctttgcgcttccaaaatcgcatatttttaattgatgagtttggggattaacctatgaaagccacatcataagagaatcaatgaattatcctttcatacgtcttaccaacctttaagcagaaattattcacactataccagtagattttgtggcttaatgtcacggtgacacaccccaaccacgcgatgtaagtagttcagcgcacggcaaatctgatatccaacaaagcaacagaaatgacaaaatcagcataagtgaaattataaatttcctatgtatttgtagctttatgctacacagattactagaaacgagtaaccggagagctaatagaactcacctgataagtatagagctgaacaaagataattggcatatgctgattcattttggtatagtgcttcgatgctctgtatacagtttcgggaacatactcaaggacaaggttgagatacagctcatccttgtcagttgttgaaaagaaagaatgcctcagccgcacaacgttgggatggtcttgcaaacgcatgatctgaagttctctgttcttgtatcttttatcctgcagaaccttcttaattgcaacttgttcacccgtttccaggcacttggcctatccaaaaatcagacagaaagtcaaattctgggaacacaaatagttaaggattagttatgttcctgctataagaatttccacctacctggaacactactccgaatgagccggttccaaccactcgctgggccatgtatgagatagtctgaaacaagaaagaaagagtaaattaaagatacacccaacagaagtgaaaagagaaacaatcttttcataaaagaaatgactatcatgattaatagcttttctcaaacacaacggcaatcagaaaaaaagttagttgaatgacctgctttggctttccatctctacccccaactgtcgtcgtaataacttgtcccgtttcggtcccactgccgtttacaacagttgtttccatatccttcacaagccaaatgaagatgtgagcagtggctaatggagatcacgacgacgatatatacattgattaagcaactcaccttatcctcgcggttggcatttcgctcgtctctaatcttcatttcgatcataacatcgggaagctgatcatccacgggtttttccgatacagcaggcacatttgacgttccagcaacactttcttgtgacaaaacgtcagctttcatctcaaaacaagaactattttggtcaacctgcattggatcaacacacaagttgtcgttctcttgatccagcttagctctcttcaacgcatagtccccaccctaaaacaaacaccaaaaacacgaaattagtcaggtcaacatcaacatactcatccaaaatcaatgaaacagcagagataatcaaattcatacaaaaacataagcatttactagaatatctaaaactaaagatctcaaaagcttaaatttgacttgtaacatactataaacgacatcaatccgtaatttctggatgagaatgagagaaaaatttcaacaatcagaaatataaaatcaatctgatcttgaaacgagagacattgaaaatggatacttacaggatccgaagaaatggaggtccgacccgaagcaatgctcttgagacgacgcatcacgttcatcttcgctttattcaccaaccaaacgaggaacaactcagaaaccctaaatctccgaaaaacttcaccaacacagcttcatgcggagaataaatgaatcaacagattcagatatttcaaattcgaataactccgaaagcaaaaccaaaaatctaagtttttcgattcttcttcaaacgaaaaatctggggaaaggaagaatctccttcgttcttcttcgagcttcttcggtttcttcttctctttcttcacgacccaacccaggtggaatctttctctctctctcgtgggcaaagccaatcatgccagcctcgttctctttctctatctctctctactctttttttggtcaaacattgactcctcaccgttgatttatcgcagcagctcatccgacgggttaggatgaatccgcccgatttcgacaagctgtgattactaaagtacccctgtattgtttgtctatttacgtatcccgggattaggcaaaaggatttgggggttttgaatgattgcatctaagcccacgcggaatatgcgggcactgtattattttcatttgaccatctttgaccacttccctctttttgctcctgcaacagataattttagtaatttcttactgtttttagacatttttaataatgtctctgttcaaaattttaaactattaattatcatcatcctatgaggtaatctataaacaattcaagtaatctattagattgagaaacgaagtaaaataaaacatatattggttagtttactatctgaggaatgttaatgaggatgtggttattactgattgaaccattgtcttatgggaaaagatgtcaattaatcccccaactttcaaaaaatggtcattttatacgtcaacttcgtatgctgccgtttaaaacatgaactaaacgttaactaacttttaaaacatgattattcgttaaccaggccaaaatagacatgccgttatcagtcattaacggaacttctaacttctgttatcatccgttaacgactttattagtcaagttttaaattgtggtcattttaaacatcgactttatatgtggccattttaaacatgaactaagagttaactaccatttaaaacatgagaaattcgttgaccaagccaaaataaacatgttgtcatcattcattaaaagaacttataacattcattatcacttgttaacgactctattagtatccctaaaatgactttgttttgagaataatccaaagaaaatcaggattgttttctaaatgaaactccagttccccaaatctatttctacaaccgctcaaacaagacgaacaatcttataatgagtcttcaatttgcttccatgattccttttaaaatttaaaacaaatatataaacgaaaacacctttatttgcttccaattactggcactgcggttatctctatatcaaactatgttcttgggttctgcttaaaactttttgatatggaaatttcatatggaaaaaatctttatgttctttcgattattctcaaacgacgttgttttggatagattagcagtcattaacgagtttctaggttctactgataaagacatgtctattttggcctggtcaacgaatttttcatgtcttaaatggtagtcaacgtttacttcatgttttaaatggccaaataagaagttgatgtttaaaatggccacaatttgaaacttgactaataaaattaacggatgataacggacattagaagttccgttaatgactgataacggcatgtctattttagtctggtcaacgaaagatcatgtttaaaaaattagtcaacctttagttcatgttttaaacggccacatacgaagttgatatataaaatgaccattttttgaaagttgggggattaaatgacatttttcacttgccttatgggcttattagtgcagtatcaatctaaagtctttgcaaaatgaacggataaataatggcacatgatattgttgtaggcccaattaatgttataagatctaggaatcattagccataacgggccagggctttaaaataaagcccaccaccgtacagctatttaaattcacttgcttacgtttttcttttcctgtctgcaacttaaaaacaacatattgagaaagagaaaagaaccaaacaaacagaagggagaaaacgacggcgtaacgtctggttcatcgcaccagtctgtcaagggaatgacgtggcgcaacgaaaatggcggaatacgtaagccccatatcatgcaaaggaaggagacaaggtatagcattaaatgaatgaatatgcctgcaaaatacatttaatgctccacgagagacagctttttttttttttttaacttgaaacgatacagatcccatccaacataacatcatcatctcacagttcgcgttttctaaccacaacacaccccacgcgtgtggcttactcgcgctacataataaaaataacaaacacaaacaaaaagagtaaagagggggtttccaaaccccagtcaatacccgaaccaccaactcctccaccgtgatcggacccgaacccttttacgtcgttgtcccatcacggtgacaaaggagttggatctcgcccactcgcgcggttcgttcttgactcgacaccccctccctcccatagtacaagaccaaaaaaacaagttatataaaaattcacaattcattaagaaaaagaaacacacgcacgcgccagtcttgatcaagatcagctttcgcattgtaaagcggcacgaatcttctgaacggtgcatgatattaggttgttgacagtctccaccgactcaaccgtgagttttgccgttgggagattgtttacaaggatttgaaacgccactgtcaagagggatccaccaccaaccggtcgctggtcaccatcacctgacccaccaccgtcaatgcctccgtcaggaagaacagcgaaaccggacggaaggagagccacgtaggatgaatcaccaccgttcatcaccacatgcatggcgggaatgtcgacaggcgcgtatactacaagcgctccagatgcgtcaatgcatgtctcctgaagaattagcatactactctgattcgcgttcattgcctgtagagttgacaaaaccaaaacaacctcagctaaagtgtttatttacgagaattgccattctgaccaaacagtaacgcttcatggttaaaagaaaaacaagtcaaaacaacttttcagatagacccaacaaaaaaaaaggaagtggtgaaaagtcaaaaactacagaagctaagtaaaggttgaaactgtcctattaattttgacttttgaaacgcttacaaaagctgtgacacttttgttttctacttactaataaacaaatataaattgaaattatagtgtcatcttttgatatcacccaaattcctaacttgtcctttaccaatccactcttttgtccttcataccactatcaactccatggacaaaaacgtcacaatcacctaatccatattccccacaaaactcgaaccaatcacacacacttcttagctaaaccggaactctattctataggccggttttactgaactaagatctactaaccggttagaatagcaatgttaaaccaggagtggtacgtgatatggaaaaacttacattggagcggagcagagagacaccctgatcttgacctttggtgatatgggccatctcctgcatgggaccaccgttggatagaatatcccattcgcatctcatccgttcgttccgcaagaaatcatacagacgctgtggtgcagcaggtagccaaacagaagtggcagcactcaaaacaatccccggaggctctcctggatcgtccacactcttacgggtcataactcgaacgtccgggtcaacatttccaacagtgagcttgctccaattgtggaccgacggcgccgagattcccgaacagaagttgaacgtcatgcgttgagctaacttcagcatgctttttcgaccaccaggcgttattgctgcttttgcatgtaaaatggtcaaaagttttgtaacataatgacaagattaattatgttaagcataatgacaagtgtgtaagaaacggacatgtgttgtcgtgagatgtaacggaggaagaaatgaggatggcgagacactcgcactgtctctgaagtgtagcgagccatctttgagagccaaaaccaaggcctgaccgtagcaacggcctgtacagctggtggatttggttctcgtcgtattctgcatgctccacccacgtgacctgcacaaaccggaaatcaaatccatatgaacaagcaaaccaaccgaaacacggtctacttaaaaatacacttgcacgatgagataatatgttaatttttaatagaagctaataggataaaaattcaagataataagacaattgaaataaatattttactatactatttgaagatgatagagacgggatatacgaggccgcatggaagaaaggaatagaaacatgaaaaattgatttatttaaacgatgattagaagcttttttcaatacatgcatatgaaattaatgtgttctttccaaaatgcgcacaaataaatttggacagatgcttcttgggaaatagatatcaaaatactaataacatatatgaaaatgagtaaatgagttttttcgattttggaaacggacccatttgtcgaaaacttgaaatctaatccagagaatccgacagaaagagaagcatccggatccataaaattttagcaatctcggaaggttcggggatcaaaattcgaggaagaaaatgcctattcaaatcattttcttattctgacataaaatcagattataaaaaggaaaataataccgtttgagagagaagactaattaaaaatttaggagaaaaacaaagactagagaaagatcaaatttggagaagtaagattaaaaaaatatatattgagagtgacagtgaagtgggtgcagcgagtaatggctaaaaaacaagagtcatagatgcttgagcttcttcgtctagtgatcacccaattaataacctagagatcctaattttcttcattttcatcgaatttttcattaaccaataattttagagaaaagattccaatatgtttctgattaattattactattattcactactattatgtaacgctttggggttaaaagagttgatttaccttagagtatccattagacacatcctgcaccacacatcctgatggtagtcgccggattaccggggcaccaccagagttttccctgacaggatcaattgatacatccaccaccgcccacacaccctccgcgtgctgtttgcagaaccggaggaaattaacattacgaaccggaaccagtggagacaaaacttgtagctctgcattcatctgcacgtacgtacattagtatattcaaaccggtttactataacattaaaccggaatgtgattgattaagaagatatttggtttaccagttgaagtgcaccatttattgttccagccatcccaccggatataacgtcggtggttgtagctcttgcgacgttacacgggaacatctccgtccaccgattctgatgaacaaaaaatataatcagagaacaaaaaaaagatatgggaataaaaacaaaaaatcgcaaaaaatcgaaaacttacggagtccattaaagtctcgacgagagctaagctattgatgatgaccataccagaggttctagaagcttcagtagctaaaccggttggtttagtagatgaaaatgttctcatgtactcatcttggttaagctcgtctctctcaccgtccaagcttttgacccataacggttcttcactctgagcaagcttcactaactcatccatagcagttaaagccagctccagcaaaactgacttctgatcaatcccattaatcaccgtcgactgctgctgctgcggaggtaagcaaccaccaccaccgccgaaatcaggagggaaagcgaaatgtccaccgttgttgttggtgccgacagcgagttctaaggaggagttgtagtggtgattatggtggtggccaaggaacttaccggtgaggttacagacacgatcaagctcgtcttttaaacgagcgttttcgatacggagatgatgttcttcaagagagacatcaccaagcatggcaggtccaccacaattggtgcagattggattcctcattgcttcacgaatagacatgttctcagctcttaacttatcgttctcttgtctcaataacgcgttctcatgcctctctaattgagtctgcgccacaatatgattttattacaaaagaattc

SEQ ID NO: 504 - DNA, 18756 bp, Arabidopsis thaliana
gatacggagatgatgttcttcaagagagacatcaccaagcatggcaggtccaccacaattggtgcagattggattcctcattgcttcacgaatagacatgttctcagctcttaacttatcgttctcttgtctcaataacgcgttctcatgcctctctaattgagtctgcgccacaatatgattttattacaaaagaattcattttttgggattaaagatgtgatttaatctccacataccttcatctgagtgcgacgattctggaaccagaacttgacttgtcttgtctctaagcaaagtctcttacttagttctaatctttgtttctcgtctggatgcggacactctttgaacatactgaaagcaaaaactcagattcattagatcgaataaaagagatgatggtaataacaatatggatattggatcgaaaggtataattacgattcgagttcttggatttgttgaggagtgtgtcggtgataacgtttcttccgaggaggcttatcagcagcgtcttgatcttcaccggagataccttcaacgttatcactaccagatctactctcatgttcttcttctcggcttcttctgttcacactcccatcgaaagtatcgcctcctcctccgacgttattattgttcctcatcgatgcttctccacggttggttcctctctccggttgctcctatccaaaacacaaattaggtttaagtataaaaagataagtattagtagtagaggaagacgacgtcgtacgagggctagagagaggccagaagaagcgtaaacagatttcgttagaggaggagagaagagactagcagccgctgccgcttgagccatagcaccaccgggtaagacgttagttgcggcggtgtggttgccataacttaaaccggagagaagtcttgctccggtagagccaccaccgggtgtgttatcgaagagactaccgaagttcatcaaataaatacaagagaagaaactaaccagatttgacaaacaactagagaattaaaagattgatacttttcacgaaaagatggatcgagaactgaatcacacagaaacaacaaaagagggaagaagaagaaacccagaaaaattaaagaggaaggagtgtttattactgaaatggaggagagagaaagagaacgaaagcggaaatttgattcaacttctctctcatttgctcttcgttctcagtctctctctctctcttaaaaatcaatggggttttttttttggtgtgtgtgtctctctctcttattgtctttcagagagtgatgtggggaagaagaagatgatgaaaatgggtaaaccctagttttggggtaactgatgagagaagaagagtctaatattcacacttgcatgttgatattgactctctttttcccccttttcttttattttcttgtacttttttgtatattttaattttgagattttaaagacacttttttagattttgttttcttcttttattacttactacctttcattttcatttttttggttaaatgcattttttgacaaatgttttagtttttaaaaagtgtttcaacaatttttaataaaagtgaatctattaaattcaaatccaaaagactcaaacttaagtcttaaaactgaactgactttcttttataactgatctgacttttttattattattttaatataattgtctgtatattaaaaacataactaaatctgaacaaactaatgacatttgtctattttaacatctttcaaattttaaaattatatttttgatagaaaagagagtgaaacttaaaccaaaactgtattaaagttaaatatgctagatttcaaatccattttaagttttgtcattttttaaaatactaataaagtcaagtttgtaagtattaccctttttaaacatagaatttcaaacaagaatcaagccaaaccattgattgaatggtctttactccaaaattaaccctaattatattctgattatttctatataacgaacaaattttatcaacggaatcaattaagagtggggaaaaaagtaagtgagaaaaacgttaagaggatgatgaaatagatatgtggactcttggaaaccttacgaatgcacgagactctcttaccagaactactcggttgactttttctctttttttataacgcctttctttatttatcccacgcgctttttctctctactcgccaaaattgcataaaacaattttgattagttttaagaaatataactgaatatatgaaagacttttgtctagcagcaacacacaaccgtaaccatattttcgtgaattcatacatgcattttttttcaattattgatgtgaacatttttattttatagtttgagatattatactcatcatcctaaaggataatcaaataggctatagaatcttataagttgtgaaagaatctacaatttttaaagtaaacgacatgaagaagcgagcttgtgtcaaccaaaaagacattctataattagtcttttcaagctccattattgagcaaaaattgtatgccctaaatggtgagatgatttggtaaatttatgtaagtacaattattagattgataattgagaaaacttagcacactgatttaaatgtacttccttgtagtctgctcatatatcttttaaggaatagcggttaatgctaatgtaatgtgtgtttcaccattatagtatagtagtagtattttgtttttgtgcttttttctttttggttatgaaagatacccattaaatttgggattggtacactcgactaattacaaaaaaaaaaatagtagtattaaaaataaaaaaatgctaagtgatggttgttttccgactgttggctcaaaagtgtttctccatgagacaacaatatggccatgacaaattttgaaaggacaaatatgagttgaagtcgtaaaggtcaacatgactcgaagatctctttttacttttttttgggtagaagaaacatatgggtttcgttgtagattcggtcgagaagtgatcatgagttcgtcgttgcaaacaaagaattgaaccttttacgtcaagtttgtttgaaaaacatgataattcgtcgacttttccggtcaaaacggtgtccacatcacatatgacttggtggatctctatttaaggagaacaaccaaatcgctaaactattgttatatacaaaatcatgttggttaaacatatcaaagctgatgacagaattaaaacgacatacaaaaactgaggttatatagtgttgatgatatttagagtgtttataaagtgagaattaattgaaccgaatttatggatcatcgcacttaaaaagaactgaataataacaaaatcatggaaaacaatttcataagaagaagaaaggaagtagtggaacatattggtttggttcggtttggagcacatgggaatgtcggttccacagaataaccgaccagcaagagttggtcacaaaataatttacacataagagtctgccacaaaataaaaaaaatgtcgtatggcttctcttattggtatgacagagtcatgaagaaattagtttggtgaataaaaaaaggttgaaaagtaaagaggaatattcattcccattcccctgattgatgatataaaggacaacgtcattttcattgtttggttaaatttggtaattactagattaccacaaactccaattagcagcactggctcaaaattctaccacagctcaatctaaactaattgttatatgaatgttaacatcaaaaaagaccagactatcgaccatgttcatgtggtttcaacctcaaataaaaatttgaaaccgatatcaagagaatgaactataccgctgctaaatatttaccattacataacattattgaacattgagaaacaaaccaaagaccgttagaaacatagcaaagactagacttttctacaaagacaattccatcaagagtcacatctaattgaatcctctagtgtgtcgatgatgttatgttcaaacagatgaataaaacgatcagattgtcttggacgttataaagcataagaacatttattgagacaacaaatatggttcaaaagaggacgaacgaccaaacctttgttgcattaatgtcctcaacgttttttccaatccaattggagacttctttctctctcaggttttttaccaaaatatgtcttcccccacctgaaaacaagtactgaaaaagagaagtcttctatagtgtccgtttctcacccaaaatccataagaccacaaccttgtttttttactaaaacattgaatcataggaattgtcagtaagttgggagtttttcaatacataaatacgtatccaggacgtgtacctactaatacatggtctctagtacaaaactatacgcagagtcacatgcatactttactcatgtaggtcacaagttgcttctaaaaggtagacccctcacataaatcactgacacaaccacgtgtgaccaagaattaacaatatcaggacattatacgattgtaatacattcagatgcaatgtcacgaacacaaaaaagtatatatcatctggttggtgtcttagggacagacagatgagggctggagagcaagtgacagtacctacaagattgagaagagcttcttcttttcttcttcttttgtgtcttcagtgggagtttgatggcaatttccagagagatttggttgcgataagaatcttctctcttccatgggattcaggttctttctcgtgtatggaagaagaccatcttacagcatgagccattcgtgcgactttatctagcacctcaggagagtctcggatcacaacctttccttctggacgtaatattctgtccatctctaccattagatctactaggctacacctgtatgcatatcagacaattcagcttaggttaagtatataagacagagacctgtgttagaaatcaagaatggttttacgttagttatacctcgatttgcttgagtcttgtcgttttatcagtgattcaattcctgatacatggatgaaatcatacgtgcggggatatgttgaaaatggttcacacctgcaacaaacaaataatagggttttgactattaaggaattgtgacatatttcgatcctcattgctgccaatggctaagatacagaacaagagagataacatatctaagtctttattttgatcaaatatataaacaacaaatgtgactaaccaatcatggtaaacaccgatgagacctctgtcataaatcacgtcaagagttaatggcttccgagctggaatgacattcataacccacacaggatcagatgcaagggttgctgcaaagcctccgaagaatgcgttcatgtccatgacattgcggacagttggagatttcagcttcaagttaagagaatccctgtaataagcaacgcgtcttgcccaccgccttgcatctgcttcaaacacatccaatccgtttttcatgacaatggccctagaaggaactttagtaagcctctccggccacttggatatagttcccaaagcgtgttctcctttgacggatgatggcctggtaacacacctcttcaatttaaaatacctgaaaaaggcaaaaaaaacaaaaacaaaaacttcaattttgtcttttacatggtttcaatacagttcaaaagtcacatgcacataattatacaacaagaaaaacgcaccatgcatcacttggcggaacagactcatcacacaactcaagcccaaactcattctggctaggtagacatgaatctccaacaggcttcttccagatgacagtgtttccatcaaccgcaattagctcatagcacaaagctctagccaccgcctgaagatcagcccattctttgtcttgtttaggccattgtacaggtgggccagagattacaagatatcctccagggcgcagtaacctatctacttcgatgaagtaagttgcatctgcagacaaatcaccaaacacaataagaataattgctgctaaaaaccgcaacacacgtacataagtagaggtatataacccaagggactcactgtaagccgtaaaaggaatcaaacatcgggaacagtgcatcaggtcaaaggagtatgcaggaaaggggagtctacgagtgccaagcatggcaacaaatgcaggcactcctctttccaaagcgaactgaatttgagatttatgtgaatctcttggagcaaatgagagggctagaatgccttgagatagtagagtacctccaaaactagctacctgcaaaggtttacaattaagtattataacaatacagaaccaaacgagaaataaaaagacttatgatgattctcaccccgcatcccatgtcaagagcagttctcaaagttccaccattaagcggaatatactgtgcaagcttttcaatgtattggccagctccgccaggaaacatcgtgccaccgcctgggaaagtaaagtattccccttcccttttcatccatccttgatgacctttccggtcagcaattttgttatatggcatgtttgcatgccaaatctacaaagttcaaacagccatctttaacagtctaacaaacaccaagagacatgtttctaaccatgcaaaactagacatcaccaataaatcgaactagctaatagctatcctgaactatataatctacaaaaccatggtaataggagctagaatccaatataccttgtgaagactctcaggccacggaacaggaattttataaccagaaggcggaggaatcaaacagagcggagtctcctcaggcaaaggacaatgtctctccctatagaaattcatctctctactaagctgactattccttctcggatcctcacaaggcatatgagcaacagcttccgcaggacaatactcgatcggttgcaaatgctgaccagcttcaaccaaagtcactaatcgctgccgttgcctcggatctgacgccgtagagagaagcagcgtttgccgaccagaagccgccatggaatcaccaagaggagtgaataaaaggatgaagaagagaagtacgataccgaagaaagcagcggttacgatgtcgaggagacgccattgacgagggttaccacgctttgatgcaggtagattcacgtgtcccatagctttagcttcaaccagtactcgaagctttcgtcttcgagagcagatcagatgcaaatcttagggtttataataagattcaattttggagatctgaagaatttgtcggcgattataaaatattactatttcgcaatccgttgtgtgagtgtgatcaaaatctcatttagttttttctcagtgctttagtaagcgtctctggtgtctggcgaagcacggtgaatacataaattgatttaagaatattataaaaaaaaatggaatgttccgttgattatagtttttttaactttttgaggctaatggatttgggccttgaaatgtaatttgggctggcttatgagaaataatataccagtggatcgtcctttgacggtcaagatagaacattcagattacattatagtataggcgttcgtttgaaagttcggttcggttcggtttgatttcagttctttcggttttaaaatgtagtatccattcggttattttgctttaaatattttcggatctttcaattatttttggatattttcggatatttttgttattttcgagttttttactattttatatatattctcaagtatttttaattatttattctagatataactaatacttttgaaaatatatttatatttcggatattatcggttacccaaaatattatatttctgtttgtatccattcggtttcagttatttcggttacagaatttattatccatttggttaatttccaattttggttcgatttggtttgattcagtttggtttatttgccgaggcctatattacaatagatacgagattttttggttaattacatttggatgaaacaatacgaagcccaaagcaaacgagtgaaaaaaatagaagaaagctcacattggtaaatggtaatcaaatttctgtttggcaaatattgatcccttcatatccttgcgtgacataggatgataggaagttagacgtacgtagatcagccacaacgcttctagcaacttcatgcgttcctgtgttgatgttcaaagatagacctgtttggtttgtctagtgaaagacagcaacaaaaagagataaatgttacattctccaaatgcaagctcttcatactatctaaagcagtaaatcccaattcatgctagtatattctcatactattcctctaagatcgtgtatagatactactagaatcagatatgcatgatcttatatctcttgtaaagaatcttacttgtatcattttcttaattcgtgaaaaagagatttctctttctctctacatggaagatagcttattcaaacatatgaaaacataaaataatcaatttacgcgtctttctgatttttgtcatattaggttaaccgtggcgttggctataataatagcaactgcaaatatctttcaatctttttggaaattgaattccactttttataagacagtactcacacacacaacactagtccacattccatattgtacaacgttgtaataaattccgtcgaagccattcacgtgctacgcgtctccggagcgtcgcttgggatagtaatcatctgaacaaaatactttagtatcaccatcatggatggacccatagtatcactaatcagttgcaaagtaaatttagatttctattttaagagtatctctttaaatggtatcaatttatgacgatacccaaaaaaatagaacaattcaatagagattttctatttaatagtacttaataattatggattaacttccaaagcagtgccaactatacaataataaccaaagaccattttttcaaaataacattgttaaattaatagatcgatttatggaaaattagcaaatttcgataaaataaatatacttaaataatcaatgtaggtggaacaatatatagactagatcataacccgtgctatacagcacgggcattaatattttatataaattaaattatatattttatttgaattacataagaaatagtatagtataaaagtgatgtcataatattttttaatgtttttactatttggatataatgctgcattggattgactttgtttaaaaatgttatttttataataaatacaacatatgtagtttttaagtaaatgtaaaatttgtatacgagttgttttggtaagaaacatgtttcctttgtattagaagatttaatttttggcctaacttagaattattctttgtataatattttggttatatttgtggatctaattggatcctatattagattatctttgatagggctcacgaaaaaacggacccgataaccaatccaatatccgaaccaaaaaaccgggttagagcgggttagaattttaggaaatttccttattgggtagagttttattaaacccgtggatatccgattggtccagaaattacccgttacccaaaaagggtattcaaaaacccaaacattaatttaatatctaaaatattaattatatttaatcttaatagattattatctaagattataattataaatctaaatatgtcaattaattttgtacctaaatatccaaaacaactaaactattcaaaaattatttgttatgtttgtcaaaatttagtaaaatatattcaaatataattaaatatattaaaacttaacaaattttaaagtttttttttttggagacccgctatctacatagaaaatacccgtttctatttttttgagtatttttaggacctgaaactttttatccaaactgacccaaatccaaatggacccgacccgaaccagaaccaaatatttcgaattattctattgggtagtaaatcatatacccattaatcccaaacccgaacaggttctacccgacgttactcatatgtccagctctattctctgatttaattatctaaaaactccccaaaaatcatatgttttgctgactactttttattcgaaaaattttacattctcttctaccaaaattatttcgtaagacatcccaaaacccttggaataatgatttcatgaatgaagaatcctaatttgaatataccaagaggttttgaaaggttttaagtttttgataggtgtgtatgtgagaaggtacagacatcgtgctgataatctgcttatttataattttaacctccagtatatcgcaggtaggcttatattttagtgaaactaaaaacttttattgtaaagatgattataaatatatgatattattttatttgattttaaatgtatagtaaactgcgagttgtatatgttttgttgatattatttatattgtttagtgtttaaaattatacacttgtattttgattgttaattttagagtttcacttgtagtataccatcttgtattaatatcgatctaaacccgtcaattatagaattttccagcttgtattaaaaattaaatcacatcatacacataaaaaaatctaatatattattaattattgtagtatataagattataaattttcaaaataatatatatgaaattgaatataaatattcaaattttgacccagtactcagtagaaagttttcttaaatctatttttgacccgttataatattttttcatgtattgaatagtttatattcgtttttaaaaatttaaattatggcatattcgaaaaaactctaattatttttttataacgatgatattatttttctcaaaaatagaatcatataaagatgagaggtgaactataataattaataaaaattaatatgataatttagatattaaatctaatttgttgattttaattggttacttttttggaaattaataatgtattttgttttttaattaagtctaattaattaaattagtatttgactttttagaattaatttactctttaaaattttatttctaatggcatacctatgtaattacttacaaaaaataaagttatatttaaaatgtacttcccaaataatataataggataaacctcactcactcacatttgtataaataaaagcattcatcttacttacacatgcaaccaagaatataacaaaagggaacaaatcacatattttgtgaaatcccaaagaaagtttttgctttcaccggccagtcatgggaaactatcggtggccgtcaaagctatcaaagttatcactcagagcaaaacaaacgaatctgtaccgcgtcattctaatcgcgatcctctgcgtcaccttttacttcgtcggagtatggcaacactccggcagaggaatctcacgctcttccatttctaaccacgagctcacgtccgtgccctgcacgtttcctcaccaaaccacaccgattctcaacttcgcctcccgtcacacagcccctgaccttcctccgacgataacggacgcgcgtgttgttcaaatcccgtcgtgcggcgttgaattctcggagtacacgccctgcgagttcgtgaatcggtctttgaatttcccaagagagaggcttatatacagagagagacactgtccggaaaaacacgagatagtcaggtgtcggattccagcgccgtacggttacagtttaccttttcggtggccggagagccgtgacgtggcgtggtttgctaacgtgccgcatacggaactaacggtggagaagaagaatcagaactgggtaaggtatgagaaggataggtttttatttcctggtggtggtacgatgtttccacgtggagctgatgcttacatcgacgagatcggacggttgataaatctcaaagatggatcaattcggacagccattgatactggatgtggggtaagttaagacttcagatcactctgttttgttccttgttgattttgtttctttgtactattcatgtgatgtctgtgtttttttttggctctcttgttaatgttaccatgcttgtgtgatgtcatacattttgattttttttctctgattctttgacatttacgcctcatatttatttttgcaagtatgtgattatttgttttgggttatggagtgtgtttagtggaactagttgtatacattttgatgattgtgcaattacattgaaatcatctattgatgtttcctttgttcatagatttatgcaaatatgtataaactattctatttatcaattgatctaggtcaaagcagagaaatttatttccaatttcgcctgtgataccctattaattagatgtatactatttaatttttgtaaggatgagaattttggtcagttgtgtaatttatgactagaagaatattctgacacagcagagtgagagtgatggataggattgtcttgatacgaaatttatagaatggaaagtcacaagtagataaaaatcaataggatcaaaactagaaacgttttcctaattttctgtttctcttattggcaacgaataacaaattttgattttctatttttattgtataatcaggctgtaatgttttttatcagtaccttttaatcccaacaagtaattaaattgcattacagctaagtaaatgctggtttagactttagagtcatcagatagaaaatgtggatttcttagcatcgatagtttcaatcttcatatggaagtaaagtggtcaaaagacttttaaactgttttttttgtcttattgatgtaaatgggtaaatttaattctagcgtttacgatcataggttatgtaaatttatcgactgtctctaaagtctaaactaatgatgctaataggtagcgagctttggggcgtatctaatgtcgaggaacatagtaacgatgtcgtttgcaccaagagacacacacgaagctcaggttcagttcgcacttgagagaggagtccctgccatcataggagtgttagcctctattaggctcccatttccggccagagccttcgacattgctcattgctctcgatgtctcattccttggggccaatacagtaagttcacactcaccctctagtcacactctctttttttgcagctgttttgttatgtatgtgtgttttgactactgtttggtgtgagcagacgggacgtatctcatagaagtggatagggtactgagaccgggggggtattggattttgtcgggaccgccgattaactggcagagacactggaagggttgggaaagaactagagacgatctcaactcggagcagtctcagatcgagagggtggctaggagcttgtgttggaggaaattggtgcagagagaggatcttgcggtttggcagaaacctaccaaccatgttcactgtaagcgcaatcggatagctttaggacgccctccgttctgccaccggacactacccaaccagggctggtatataagattactagacaagaggagatggtcttactagaaaggaagattttatatttgactagatcatggtttgttctgttttgggttttcaggtacactaagcttgaaacctgtttgacgccgttgccggaagtaacaggatctgagatcaaagaagtagcgggtggacagttggcgagatggcctgagagattgaatgctcttcctccgaggatcaaaagtggaagcttggaagggatcactgaggatgaatttgtcagcaacacagagaaatggcagagaagagtgtcttactacaagaaatatgaccaacagctagcggagacgggaagatacagaaactttctcgacatgaacgctcatcttggaggtttcgcctcagccttagtcgatgatcctgtatgggtcatgaatgttgtccccgtggaggccagtgttaacacccttggagttatctatgagcgaggattgattggaacgtatcaaaactggtaaggttactattcctaataaccgaatacacatttttttgggaagcattcattgattcttttttatttcttaaactcttaacaggtgtgaagcaatgtcaacttacccaaggacatacgatttcatccatgccgattcggtgttcagtctgtacaaagacagatgtgacatggaagatatcttgctagaaatggacaggattctaagaccaaagggaagcgtgatcatcagagacgacattgatgtgctaaccaaagtgaagaagattacagatgcgatgcaatgggaagggaggataggagatcatgaaaacggacctcttgaaagagagaagattttgtttcttgtgaaggagtactggaccgcacctgcgcctgatcagtcatcagatccttgatcaagcttggaataattcataaaatttgtagctccattcttttttcttcaaatgttttgtacacactaatcgactttgggggaaagaagaaacaaacacccgctaaattgtttcaaaccggagattcattgcgactttgtgagaaaatgaactagagagtttactacaaagtgtgtccactatgcagttagctacgaaagcgcttacagacttacagtacactgaacttcaactttctgctatcatcatctcaggttatattgctacaccagcagttccagaaacaacgcttcttgtttgttggtgaggctgagttcctcaaaggttaaggcaccgtcttgaatgctgaaagcacgtcgaggatatggtctaacctgtttaccaaaaacaattacaccatttctaaagcttgtagtatcagaaaatataaaccaaaatgagggggatggcaaaactcgaatccttagaaattgcaatgaaataatgcatgagaatatttatcgcacatcacagggcttaccactctatatgtgccaggtttgactaatccagcagcatctatgaagtcaaaaaggtactgcaattcaagaaacaactgttagggaagcttgaatacgtaaaaattgattacctcgctaatcacttgagagttgagactcacgaacttcaccttaagcttgtctgatttgagaaagcgacgaccatgacggctgctatctggcattctaacaagtagagtgatggcatcttcattttcaccagacggctcaatgggaagcgctgcctttctctcaggttcctgccacaagtgaggtacccaaaacagtgaaaatgagaacaaacaataaaattgacaaaacaaaggaatatcagctttcaccggacagggcattacaaacccaaaataactaacggatacctaagatatggatttcttctagtcatggaatcaatgttaatcacatcttacaaccattttgctttaacattcactatgatcatatattgactgatagactgagcatatagaatttgttgatggttgaaaatatacgggatcactctgattacaagccctatttttgtacatagagttctacctatgggcttatggaagaggagttgttcacagcctggactatgttcatgtcaactttcacgttccatctaatgaatgcctccaaagaaaatcaaattacctctctaacaaccctctgattcggagattgtgactccttgtgaattccaagttgattattatgtgaagcactttcgttagctactccaccaaagattgctttttccagcattattgcctcttgtagctcttttgacggaatgccaccccactagtagcagtcgagaaacaggaggtgaaaacagggtaagaagaacacatgatcaactagaagctagtcactaagaagatgttaatttgttcttgactggctactttcactgtttagaataatcgaactcgttttgaatgatttacctcttcaggataagaaccttcactattctggagatcatgtctgtgctgagagctggaattaattggctgcttttggttcatgtcttcacggttgtcttgcactgaagagctaccaggcttcaagtaaaaaagttttagtaagcgagatagcttaaagagtttctacactatattaagaagaaattaacaaaactgtgggctaacttagtccgtaacatggatatcgaccacctaaattggtgaaaactgtaaagggaaaactatactaatgagcatgcatatatattattagatagcttatgaaccagaaggctggaagattgaagcttattagaggtggcgcacaaaaaaaagaaagaagcttattagaggtgaagataatttagtttcacacctgatatctagtactttcatttgtattagactgacatgggtcatgatgctccacggactgaggcataaattcagctagttggtctcgcaacacactctcatgctcttccatctgagagccattgatgataaggtaagacattgcctacatcgtatatagcagatgaaatatctatcaatgcctacctctaaggacatcgaaattgcacgggcaatgtcttcatcttcccggttaataacctctcttggagataaaacgctagatggattctgcattaacaaaaaaagaaaaagtaaaactatgtgaagctcatgcaaactaggagctagatagggtgaagctagaatactatacattgtccaaactatatcttgtgttaagacgaccctcttgaaaatccttcttcgaggcctcaatggcagctctgatcatttcttcctctgcatcgttactatggacgggtgagtcagcatccctatgtgtcccaccatggacctgggatccatagcttggtgaatgcctagcataaccgtctccaaccgctccaagtccaggaggacgagtgtgatcatttccccaggtagagtgagcagggaacccagtgacttctccagtgtgagatgatggagaaggacttccagagagagcagagccactgagctgcctaaggatattccgtctgtaattgggatctagaagcaaagacggtctaaaagcccgagcagccgagagtatagatggaagtgcgccagggactggcctagactcgttaactggcctagtctcgctaccacgaacgtgattgttatcttccacaacattgtagtctgaacgagtgtctaagcttgagtcatcataactggaaggacaatccaaaagagaaaggcaacaaaacaaagagcttatacaccatgaaaaacaaaaaaacaaaaaaacaaagaagcgaaactcaaaaactcttagaaagattgagaaacatacatgcttctttcgacatctctaaagtgggcattgatcgcttcagggagattattgccatgttcctgatcaaatttcacagaatttcaacttctagtagtgtgcaataacgcaacgaatcatagatctacactgatagactaactaaaaccctaactctcccaattcaatgacatttcaaatctatcatcagcaattacacatttgatcgcagaactaaccacatcttctctaggtaactaccgtcaatcttggcataaggcatttcacgaaattgccagtcacgtcctctcggagaaccggatagagagagagagataaagaaaagaaagaacctcaagtctctgaatcgcgagtgactcggacgcgccagtgatgctcatgtaagattggatagcgtctctcgtcggactcaccatctccgccggagaaatcgaacaacaaatgattcaccgggaattatggaagcaacggtgttctcacttctaagattagttcaactgattcgaaccgacggtgatgagtcgccacaacggtgacgtaatcactatttaattttaaattcaattttgtgttaaataaaataataataatttacgttagtcattattatcgattcgacgttctttcaatcttttgttccactcgataaaactcttcgagttccgtagaagtcatgattgcttctgttcctttatgctcttcacaaatacagtagaagattaaaaaaaaaaaactcgaacaaagaaaagttctctactaaagatacttggaatcatattcgcactacctcgaacacagtggcttggcatagaggtgtatggtttacacatgaaacgccgaaacactccttctcggtttggttggcagctcatgatcgacttgctaccggtgaccgtatgcaaaaatggaacaaagatgcagtgggagattgttacttctgtacgaactgcctggagtccagagatcatctctttttttcttgcagctatacagctggaatttgggaagcgcttgctcgaggattgcttcagcatcactacacaagtgataggcaccaactgctcaacctagtctcagcccatcgcaaggataaggtaacttgtttcttggtgaaatacatcttccaaacctccgtttataccatctggcatgagaggaatcgaagacgtcataatgaagctccaaaatctgctctcattcttattcaatggatcgacaaacaaatgcgcaacagaatcaccaccattcaacgccacaaggaccatcgatatgaggccaccttccaacgatggcttcaaagtcgaagttaatcgcaaagcttactctttctacttcctgttttcaatctctctcgtataaattataagttgcactcgttgtaaaaacgcaattttcttttaaatctaatttaacattactttaaaaaaaaaaaaaaaaaaacctaattcgtttccctactattctcaagcctctcatacttttttctgagacatgaagtgttctttagaagatgga

SEQ ID NO: 505 - DNA, 106184 bp, Arabidopsis thaliana
aagcttgacatctgtatctttttcacttggaggctgagattcacaaaaaaaaaaaaaaaatcatattgaaggagacatttcatctcagtagatccacaagaaataagtgatctcaagcccacttaccttgataaccaaaggcaaccgcaaacaagctctgcaaatgcaagtcatcatacagaatggacaagcagctctaacttcctcatgtgttctttctgaatacctatcaagattcaaaatagttaaaactctcctggaaaccgcaaatcataaactagtataacgtaatactgaacagtgcagatacatacgatctcttgatgcagtcaaagcaataacacttcttgttacactttgaacagaagataagatcactctcactcgtcaagatcttacaatgatgacacgtcgaacccaaacactttctgcttccgtcaggcttaatatcctgggagaattagggttccaaaaacatattctcatcacatccgaacaaataaaattcaccaaatcgaaataaacaacattcacacaaattttgcagctaaataattgcatgagaaagcaaattttaacaactccacagaatcatgaaagagattcatctatctatttgaatgaagcaattatagaaaggaattaaccttctcgggattagaaatgtctatttcaatagatcgcttcgaaacctctcctcttcctcttcctcttccgattcttcctttgctcacaacatcattctctttcttcctcgtcttacgctcgctttcagatctcccatcttcgactaactcgccggaatctcttggtctgattcgcttccctctcattttctccatactcggagacaaagaagagaccaccaatttttaccagtatacaaaaggaaaatgaagagacctctggagtttcttcgaacgtcgttaattcatcgatttatcgccgtcgcagctttgggactatcaaagtagttaaaggagagtgacgtggccacagtccagagggtagtatgggctttaaagtctacttcgtgaatcgtaagtaattattaattagggaacaagacgtttcattactttttactattctaccgtttcaacttctgttttctttccaaatttaactattttttaaacaaccggttaaaatagattttctttaattaaccaagtggttctctctggtatctttgagagagaggaaaactctgtttaatattttctccgattgaaatcggatttcatttaagttttttttcttttcttttgtttccggtatcttgccggttttaatttccgaattgttcggagtttctttcggttttctttgccggttttttataaggccttttgcaggttgtaaatcaacactttcaattttagaagatgtttaattcttggaggtttttagatggaaatgtgttcattggatgcttgattactcttccatgtgaaggaaaattcctcgctatgctaataaaagcgtaagggcatcggttcttcatggatgatagatcaaggtgttgtggttgattggagaagagtatgacgagttggggttcacgtcatgttttaatggtcctccaaggaatattctaatcctaatcagctgaagtttaaatttccggtgaccaaactaactccaatagactatttccggtgatccttggcaaaaggcattcggtacaactaaatgtgggtagaaagtttcatggaggagctgaatcatttgctgaccggcggaagatttctccggcgaagcagtgacggggcatgtgctgaaacgttgatctacgctgcaatctccacattgcatacatgtgtcatcatattgtctatttaatgtttgcaattagtgggcttttggcctcaagttgtacctgtttatgaagcccatttgggctaattaatagaaaaatgtttgccgttaaaaaaaaaaaaaaaaaagtggttcgatggtcgtaaataacttttatgggttttggtcttgggttagagaattcaaattcatgggccaacccaattttcattttaagtgcttcttctatgatgacatttcacgaaaataatacaatggattgtcgaggaaagaagtgatgttttctgtaaattgttaggcattagttattggagaagcgaaatgtgaaatgcacattgtttgttggctattaacttgcttttaaaggtgacttgaacatatttggtgtcttatgttgattccgaagctatgagtacttttgatcaatctagtttatgaagttacttttagcatcgccttctcgattttgttactgccatcacatgtcaagttggttttgatgttttgtaagcattgataagctttaacgaacaaacttttttttgttatcattactgcgtattggagttttgcattacatcttttgcttctcttatggctgagcagggccggccctgggctaaagttggtgaaactcatgctttacgcgcctaaaattatagataatattaaagggcatcaaattttaaaaatgtttcgtagtctagtgattgtttcatagattagtgactctttcgtggacagttcgaaccttaccttcgtttttttgagactttaattataaatagatttaaaatgcttaagaattttaaatgagcttaaagatgttttaggcatcaaaatctgttgggttagccctctggctgagtctgagctcgcagcatgcaatactaatttcttaagctgcaatgcagtgagaagacaagtaaaacaagattaacattagcccaaactagattattcacaacaaatgttaatgactattaccttgctatctttatatttagcctcttttgtttgagcttaattttcaaaaataatttgctttctgtcggtttagtttctagaaggattcgactcttagtatcttatcggcttcgtgaagaaaaactgtatttcacccatatatttctcaatcgtattcgtatctcacccatgtattcatatatcgtattataaaacagaaaagatatatagataaggaaaaaaaactcatatatatatatttgcatatataaagtattaaatgcaacagctatagcaaaaaggttctatggtctagcggttaggacattggactctgaatccagtaacccgagttcaattctcggtagaacctctttttttcacactccggccaaattttttcccccggcgatttatgaaccctaaatataacgccggccaacaaccaaaactcgacgctactgcgaaatctttttctttatccttttttttcttctttttcgggcgaaatggagaattcgttgcttgattctggtgaaactatggagattgtcgctacacaaaaaatcgaggaaacagtgaagagcatactcagtgaatctgatatggaccaaatgacggagttcaaactccgacttgacgcttcggctaaactcggtatcgacttatcgggaaccaatcacaagaagctagtcagagatgttcttgaggtctttttgctatcgactcccggtgaagcactcgtaccggagacggtggctccggcgaaaaatgagacagtttctgttgctgccgcttccgttggtggtgaagatgagcgctttatttgtaaggttgcgactttgcctatttgttctatgtttgattcactgtatagagtagagattgtgatcatctcgattttgagtttttcagtggtcactgtagaaattgttggtctttaactgtagttatcggagaagcaaaatgcgacggttcaaagatacagaggccaaccttttctatcgattggttctcaggaacatggaaaggcttttagaggtaatttgaaacacaacttggtgtcttggtcttgactatgaagctataagtagccatttttgttttagatatgctcctgttgatttcaattgttagatgtttcttctctgtcaggagcacatttgtcaactaaccaatggtctgtaatcaagaagaattttgcagcgatagaggacggtattaagcagtgccaatcaaaactaaagtaagaatgtgtaccttattttaagtctataaagattcatgttccctggcattgcttttagtgttttatggtcatataatcatcgtggcatagggcattactgtctggctagcaatgtaggctgcttatcttgctattaaacgttatgcagatctgaagcagcacgaaatggagatacttctgaggctgtggataaggacagctctcacggtttttctgttatcaagatttcacgatttgatggaaagagttatctttactgggcttcacagatggaactctttctgaagcaattgaagctgacttatgtactctctgaaccttgtcccagtattggtagctctcaaggccctgaaaccaaccccagggaaataactcgagctgatgctacggggaaaaaatggttgagagatgattacctgtgctatactcacttgatgaactccttgtcagatcatctataccgtcgatactctcagaaatttaagcatgccaaagaattgtgggacgagttaaaatgggtctaccagtgtgatgaatccaaatcgaagaggtcacaagtcagaaagtacattgaattcagaatggtggaagagagaccgatactcgagcaagtccaagtctttaacaagattgcggattccatagtgagtgctggtatgtttcttgatgaggcatttcatgtgagtaccatcatctccaagtttcccccgtcttggagaggcttctgcaccaggttaatggaagaggagtatttaccagtctggatgttgatggaacgagtaaaagctgaggaagagcttctcagaaatggagcaaaaggggttacatatagaccagccacaggctcctctcagatggaaaggacaccgagtctaggaacaacacatagaggatctcagagcgtaggttggaagaggaaagaacctgagagagacgagagagtcatcatcgtctgtgacaactgtgggaggaaaggacatctcgcaaagcattgctggggtagtaaatctgatgagagagcttccggaaaatcaaaccggatcaactcctcagtcgctgcacctgtggaatcagagactcaagcaacaacaaacaatgatagggggtagtagttgatgattgctgaagccaaaatgtttatatctcttcacagatatacttaaagaggtaagtcttttgaataccgttgattcaggattcagaagcagtccttttatgaccttttttcagcttgtccatatgtctggcctattagatttatgacactgaaatgtataaaagaagaacagagagatgaccaatagatcagttttggcctgatttaatgtaaaagtatacttttatgaatgataatttttttgtcaaaattgctttttaaatcctattttgaggaaccaaaataaaaacagaaacctcaaaactgatatacaaacaaataaactgacatcaattgaggtgacaatacttaacacacaaccaaaaattaagagtttctttgtcccaagcgttatggaagatattctcagcctctaaaattaaacttgaacgtcgaaattttaaaaaggaccagatggagagtaatataaaattagcgggtgaaaaatagaagaaattaaaagtttcagggtgaaaaggaaaaaaaatgaaacctgtcagaccgccgtgcgaccaccccggcaagggagaaccgagccgagtaaccatcctctacagcaccggatgcatccaaggacaatcgtagccgtcaatcacgctcaagccgcacggtcacggttcatcaacaagggtttagggcctgtctcttgagaaattttctcaagaaaacagatgtacgagcctatagttcaagtaaggtcgtgaccattgatgctttgtatccatatataaagaaaacgtttctccactagcttatcgatgtgggacgcaaaattcctaagaaaaagcaatcataagctaatgggcctacacgaggaaaaaaacactaatgggcctacattgttaacaaagcccatatatgttcaagcccaataattagagattatggtttcattaggacaaagaattttaagttcaaacgtcatttgacattttgaagtgtaactttaaagcaaacagaaatcttcatttttgtcttttacacacaaatttaacgagcatcgaactcggtaattgtaacatcattcaaagatgcaatatgatttatctgatttttgtctcttgacaatgattctccatctcccgagtaaaatgcgggttgcgagggtctcggtaaagtgaaagaatttgcattgagcattacaacaacagaagccattgttggtctactctctgcattctcctgaacacacaacaaaccaatgtgaatgcatttcatgatttcatcactgacacctattgtttcaaccaaacttggatccacaatgtttaacacttccccttctctccagctcttccatacctatacgtataaaagacaatatatgacttgaaatcaagacaatatatgagtcctcaattacaaccccaaactcaaagtctagagtcaaaaaaaacaaagcaagagttttattcacttacatagctaaggaggaataatgagctgtcttcttctggagaccaattgtttttcttacctttaataatctcaaggactagtacaccgaagctaaatacatcggtttttaccgagaattcgccactcattgcatactctggagccatgtaaccgctgccaaacgagcaaataatgttttggctttcattttagttttacagaattgataataacttaaagggtagtttttaaaatggtagcttactaggttcctgcaactttgcttgtaaacctggtctgacttgtttggtcagtatcaaacaactttgccattccaaaatccgcgattttcggattcattgcatcgtccaatagaacattgctggctttcatatctctatgaacaatcttgaaacgagaatcttcatggagatagagaagacctctagcaacacctgagataatcctataacgtgtttcccaatctaagatcattctcctattagaatctgcgaaagaaaacaactaatttggatcaatcattaaataagttactataaatagagagatacatttgtttggggtttagtttaaggtaccaaatatgtaatggtctaggcttgtgttcttgaagaactcatagatgagaattcgttcttctccttgtaagcagaaacctaagagcctaacaaggttacgatgttggagttttgcaaccaatgagacttcgtttatgaactcattgtctccttgtcctgatttcattgacaatcttttcacagctatctcttccccataatcaagaacaccctggtgattatttaaacacatgtcaaagagatcaagtctttggagtgcttggtttcaaaattaaggtgatgtctctttttgatgatgatgatgatggcgattactttgcttggttacaaaccttcatctcatgtcataagaataaaccgcaacatgaactactcatctcatgtgagattagttttctctatttgctcgaataaactggattagattagtttttgtctcgctcacattgttgcctctgatgaaatatatgaagtttgtgagtgtcatgttctgttgaaaataccatcaatcatattttggtggcacggagacattcattatggcaataaaaagactacggagactcccaaaggaacgtagaggatttctaccggaagcatcgagtatattggtttcaaggaggagataagatccagaatcatctccaacaacattgaatctatacctactagttaaagtaatgtcaagggcattttggtttctcagcactagcagcaagctgatgcctgatagccaataaaaagaatgtggaggggaatatcgtttgttagcataagtgtaaaaatagcttggttactctcttttcattcatagagacattgtttcaatttcttttatttgcattcatggtagattgtattggaatatttctgtattttgtaaactttttatgacataatatattgatttttcgggaaacaaagatcataaacatgagaaaagattaataaccttataaactgcaccgaagccaccttctccaagttgattgtcacgagagaagtcattagttgctaatcttatggtatcaaagtcaagttgcaataattgtgcatctttaatcataagctcttcaagatctttgcctgatccaaaagcaataaaaccaaaagggtcttttaaagttaaaactctcgacaagattgtttttcaaactttgaagatttgactttctgactaaaaacccaccttcatgtctctgttttgccgttcttctgttccttgtcataaagaagtaaagaaagactgcgattatagcaaaaccaataacagagcaaacggtggcaataatgatttttactttgtcatttcctgctaagattaaatttgtcaagacatacactgttagaatcaagaaaattattgtagaatacaagtgttgagacagagtgctctgtttttttaggttatatggaaacacagattacctggttttggatcaggctcatactcggagtcgagaaggaagaatctcaagtcactctctatctgaaaattacagcttggacaaaaccacctgataccaactcttcctttggtcgcgttactgaaaccataagagagacagtcgttgcagtctttctcagataaatccggcgtgcactgcacggcaccaaagaatgtggtgtaaggtggagagccaggatcagttccttgagcatacttcctcttagagccacctgatgcagccatggatctgagtcggttaagtaactcgctctgcaaccgaataaactcgtttctatctcccgtagcattgctcggatttggtgcttccagaacaggactcgtttcgagtttcccgaaaatgggtttgtctgagtaacgaaacatacatttcgtggctcgcacgtaagctcccctatgttgtgggcagtacattgtggttagattcactgcggcttgagcaatacagttaaggcaatctactcgattgactactctgttgcagatcccgatggcctcgactcgttcttgatccgagatacttccgacagagagactgtagaagttgtaagtgttggacttgagagaagggatcgaagagacaagactgtctaggtttttggagaattgggatgatttggcaaagttgctttgttgggataaacataatggattcgagggaaattcccatatagcactgtttatgtcgacggagatttgttgtcctaagctaagaaatgggacgaacaagaagaagaaaaagaacaagtgttgtggtcgagacaaagaacaagaactagtcatgactctaaagtggacttgctgattatgattatgaatgttgtagtttgttcatggttttaaacttttacataatttatatgtattttatcaacgaaaccaaatttaataagtcttcgtcactttgaaattttctgttctttgaaaattagacgtgacgtgtttttgactacgtcaaagtaggttagctgtgtagcagcattagaacctttcattcaaagtagatttgagtgttgatgtaaagcgtattaaatataactcgtctaccaatcgtaagaccagaataatatcttattagaattactaattcataggattatgccacgtgtcaagtctatcgatcagatgttgacacgtgtaagaaaataattaacttttttttcttaaagaaatagaaaactaaaaaataaatcattattaacatatactaattcatatgtctatatctaaaaaatattacattttatttttcttaaccaaaagcaaattaacaaaacaattttatatatgttattggtcaaatttttaatatatatggtattaacaaaaaatttattattattaattatgttttgttaattgttaataatttttaatattaactaaaatatagatttgatctcatataaatattattttgacatgaaatcattatcaagtaagatgaagtgtgtagaattaaaatcgagttttttatgaaatagatagttaaattgtattacaaaattgaatgtgtaagataaaattttgttttttttcttctaaatactaaattataataaagaaaaagtgtgtagattactatttagacttcaaatatcatcaataaaattgaatgtgtataataaaataaaatgcataaaactactattttactattcaaaattatatataagaataatgtatatattattattttactatttaaaatttaaatattatcgataaaaaattatatttacatcttacagccgtctatctagtatagttataattccctgcattaaatataaaagtatcatgatattgattctagacgttgaacgttatccaaacgtttctccgaattgtataaaccaaattgttcgtttaaggcccaacagtataataataataaaacattatacaataaagagctatgggctaatgtacgtttaaggcccaacataataccaacgttcctttttttctcattgcgtttagtctttgactttgcctccttatttttctcattgtgtttcatcttctcacttctaaatattccatctagcttttagttttttataggcttaacttagatttacgatttgggatagatttatttgatttgaatttgttaattgctttactcatttgctaaacatattattttcatccatatgtcttgcttaaatatcctttatttcctttgatctcgtaaaattgtatacaacttaatgtatgttgtttcttatctttcttttagtacttgcggatcattatatctcgaaagtgaatgtgtattcttgctatatgtgcatcaaagttattttcttgaaaaaacacatggaagtgtaaaccattttgcagtatccttgtccttaaaccgtactacatagtctaccatggaaacttagaatctgtagatttgatcaattaatggttttattgctgacctttttttgttctctgatttgaaatgattctctttgagccatattcttgattgctcaagttcttttttccccttttatgtcgtccatcattctttttccctataattcacatttgatttctcttttatgatctctcttgattccctccatggttctttggttttctgaaattgataagtggagggatgataacgagactctggacatggaagaaagtttccaaaataaagtagcttacactctgactctgaggataaactctttaattaagtttatttggaaccttcattttcacttctttcatcttttgtttcttgtctatgtgctcgttcaaatcgactccatcacattgcacaactgtcgtttgggcctttgtgctgccttaattttcttttgttaaattattcaaaaacagaaacctaaaagaactcttcaaaatctgtttatcatcacaaattcagttcttgattactcaagaaaacaacaccaattgagatctcatgcttaacaagtcttttacaacataaccaaaaatcatactgatacattctgaagtaaactttaaagcaatagaaaaaatcatttttgtctcttacaaagttaatcaacgaggatctaactccgtaattgtaacatcattcaaagacgcaatacgcgggtttcttgtatgattgttgtctcttgacgatgagtctacaactcctgagtaaaaagcgggttgcaagggtctcggtaaagtgaaagaatttgcattgagcattctaacaatagaagccattgttggtctactccctggattctcctgaacacacaacaaaccaatgtgaatgcatttcctgatctcatcacttagacctcttgtttcaatcaaacttggatccacaatgttcaacacttctccttctctccagcatttccacacctatacatgagttgaatatatgtcaaagtcgtccatttttgcaactttatcattcacgtccaaaaatgcagaataatcatatgaaataaaaataatacacaatatagcttttttcgctattaccaaattttaaaatttcgataaataatatatcaaattgaagcccttgagatgaagatttcaactatatctgaaaacgtttacaatatatgtaaagttgcaaaaatcggctatattgcgtattagttttgacttcatatgattattttgtatatttttttattttggacgtagagagtaaaattgtaaaaatagaagactttgagagtttatttgcataaaaatcaaaattaaacaataatatttttcacttacatagctaaggaggaataatgagctttgttcttccggagaccaattgtttttcttacctttaatgatctcaaggactagtacaccgaaactaaatacgtcggttttcaccgagaattgcccactcattgcatactcaggagccatgtaaccgctgcaacgacccaaaaaaatggtttttaaaaatcttttttcatagaattggtagtactaaaagggtactttttgggcagcttactaagttcctgcaactttgcttgtaaacatggtctgacttgtttggtcagtattaaacaattttaccatcccaaaatctgcgattttcggattcattgcatcgtccaatagaacattgctagctttcatatctctatgaataattttgaaatgagaatcttcatggagatagagaagacctcgagcaacacctgagattatcctataacgtttttcccaatctaagatcattcttctatcagaatctgaaaaaagaaaacgatataagtatgagaaattcatttttattagttactagagatagatatgcttgcgtttagtgttttaaggtaccaaatatgaacttttcgaggcttgtgttcttaaagaactcatagatgagaagtcgttcttctcctttaaaacagaaacctaaaagcctaacaagattacgatgttgaagtttcgcaaccaatgagacttcgtttacgaactcattgtctccttgtcctgatttcattgacaatcttttcacagctatctcttccccggaatcaaggacgccctggtgtttattgaaacacatgttagagagaagtctttagttgctaatcttatggtataagtaaaaatcagttaatcaatcattcaccttataaactgcaccgaaaccaccttcaccaagatggttgtaaggagagaagtcattagttgctaatcttatggtatcaaagtcaagttgcaataattttgcatctttaatcttctgatcttcgacatatttgcctgatcccaaagcaataaaacaaaaagtgtcttttaaaattaaaactctcaaaaaaaaataaaaaaaaataaaaaactctcaaagaagatagtttttcaacctttatgactaaaaaatccaccttcatgtctctttttttcctttcttttattcctcaagtaaaagcagactgcggttacggctaaaccaataacagagcaacccacagcaataatgatttttactctgacatttcttgccaaaactaaaatttattaagaaataaattgttagaaacaataaagtagttgtacattataaatattatattatattttaggttacaaaatttgataatctcagctcatacacacagaagtagttaatgaagagtattctgttttttttttgttttggtcaaacaaattaccggggtctgtacagtggtctatatctgtacaataatttatatatgtactgtggtctatatctgtacagtgaattatatttgtgtttggagaggtggatagataggacgactagttgctcgatcaggaccttagctttattgcgagcccagaagtctctctttttttcggccttcaggaacagcctttaagtaaaatccaacctaatataatgaatatccttctacatagaagaaagacactctaagatcctttttcaaacctgctcccatttcgagtcaagagatagataaatagacacgtcccattgcactgatcgggggcgttcgttgtatgttgaagcagagatgaatagggtggctgtgaagagagtgatggttgatcctgactcaaaaaatgcaaaatctcttacttagaaaaagtacctgcagattactgcccaaaatcaactgctattgaatctaagccaattgaatggaatcagatcaactattcctcaagcaaggcagccgataagtcatcgaagggtttgtgtgaataaaggaatggtaagcagtgtgatagcgcgaaagtaggccaagaaccgtgatatcccaatggctgccctgccacaaagcatacttgagagaaccttcgtttaagtttaacaaaaggctctgtgtagatattatttgtttagtactctctaatttaaaatttaaaaattattaaacaaaatgcatatcttatttttctttttttttctttttttttaatgtataaaatatacctatagcattgtcctaaatataaaaaatatataagggttacaatgtatttaaaacagtggagcacagtaaaacatacatggggagtttgccaattataaatagtatatgtattagtttcacaattatgtttgaaaaacatattgttttcctaacttctctaaaaaatacaggtaaaaattataactatggagactggaaaatgcttaagttcttgattgaaaccatggttggagagccttgtcgtagcggtggtctccactagctatgatggttgaaatttgattcctcatttgattaatacaaatgttaaaagggtacaaagactttagattgactaacctctcagtttcaagcaaggattgatgtatccgtctccgtggtaaccctcaagacatgagcaccggtgtcctgcatatccatcgggagtgtaaacatctgtacaatttgcgtttactacgcaagttccgttttcgcaacctcccattagccaccaacctaaccgaactcgttcaaactctaccgctatccccacattcacacctacagactcgagagctatcgacgtgtacaacaaacggcacgagctattcgtcaattccttcatactgagaaattctgaactttttgaactcgtatctgacggaaaacagcttatatttcccgtggattcacaacttttcagctgtttatcaaggaatctttggtttatggagcagccattggttggattcacacaattctccattaagaaactgttctccgacgatggtgtgaactgcttgccgaaaagcggagtcatgtcttcaatcttccgagtacaattggttggaacgccgaccaatatactgttttccgtcacgttttggacgggaaactctccgatcttcgccccttggcccgcagcagagcaattgaattggatcggacaaccaagagaaaacccaaagggataagacagagtcaatccaccacatattccgttacaagtttcggtcaaattagccgcggcagaagaaactcgtaggtcgttaaaagatcctccgatcaagattatgatcaaaaccaaatttaacttataagaaatcatcaccatcttcgttgaacgttgattgaatcgatctcaacattcatcaccttcctgtaaacataagaaactcagaaaactactcaccttcatgtaattcatcaccttcgttgaacgttgacttctttctatatatttgtactaacgaaataaaatatatttataattataattttttttccttatatttaaaatatgttttcaacctcttaaaactattttttgttttttttttctctctcttcatcgtattttacaataaaactaactatttcttgttatgtttcaatttcgtaactaaaattatctattttatcatttattttaaaaaaatttgtacagttttcttataattaatgatagaaattttgtttttagtataaactatattattatatgaatttttggtaattttaatgctaaactacaaccacaaatgttgacaacttgtcaccatttataattttttcgcaaatgcacatgtctccaattgctaatttaatcatataaattgcttaatatcacttcaaacggcccaaaactctcacatccacatccgtaacagctgtattttaaaccaatcaaacccttggtagaaaataaaagtcgcaaccctaaagaagaagatacagagggggaaatttgggtaatgaattcaataattgtaaagtctatataaaacttgtccactaactagaccaaatatatggctactatgaagtcgttgcaaaaatacaaaagtactttcatgactagacagtgaacgtagtgcagacgttagattaaatcttggttacatatatcaattgtttgttattctaccagttttcatatctaaatttctaatgctcatgaattatcatgatctacctttttgatataaccaagaatttaacttactaattagaaaatgtaaactaacatatttgaaatttgaaacacatattctgctgatcagttttaaatttagtttgagaacctagcaaataaaaatggaaagagaaatatggattacacctttttctcaaaaggatgttgtgttctttctttaattgacctaataattgggcttagatatttagccttggaaatatagtattgggctctaatacaggccttaatatattctcttttcaattctggtgacgtggttacgtaaacttacgttccctcccgaaacccttaaaaaattcaattcccgttatgagttttttttttttttttttttaatataacctacacaattggactggggttttgtttacaaagaaaaccaaaaacaaaggaaaaacgaaaaaaattgtcgggaccggaaaagaggatcttgccctagtgacaccgtgacgcagagaagccgaccattagcaccgacgaatgcgaaaaccacagctttgcagcagatcgaagtatctagtaaacagagaggaagcatctgactcccgctactattccttttcccgcgaccaaccgtttccaccacaaatctctcggcatggtcaaccctccgacatcacggcacgccgttgtcagctcccgtacctagcaagccgacaaactcaaacataacccctctttcccaatccaacgaatctccgatttaccgaacaaaaaaacttcaaccggccaagaggaagcaagtcacggtggtgtttgaggccgatggctcaaacgaaacacccaaacacactgaatccgcgacaaccaacaaaaccaggaggatccaccgttaacctccatggcgaattggcactacccaccttctctcgatcgacttccgccgtagttgcagaggccgacacgacggctgagccacgagaagaaatcgcttcaccaaccggcgtccaagtttcttctcgtggaagaaagtttgagatggatccacgacatttttcgccgtcgaaattgccgccaaaatttatgtgatcattcttctcttggcgattctgtaaagaatgtgtattcggatcccggagaaaatctccggatcggttttctctaatttaaattcaaaaaaaaaaaaaagaatttttattttatttttttgaatatctgaaagttcaagtgcctcgagctcaacacctacacctggaaaatttaccactcggccaacagcacgttggtaagtttcttcgttcatcgttttctctattagtggagtttcgtgagtgagtgatcttgtgccatcgggattttgatcgttcctacttaaatttgagccggtatcgatctaaaatttcaagtaaacctagatttgaaaatcggatgctttaatctggatcactcaaatgtcgttgatgtagacatattatcacaacttgacgtttataaatagccagaatgaaataagaagatcgcttgaactttaagaactaatcgggggtgataattgagcagctaggatccattgtccttaaaacgttgtttatttagttgaatatgtaacggctatggagatctataatccggttttacatttcacatactctagattagtttcatataacggctatggaaatctttaaccatctatctaccagtatgcataagctaatttaaccttttaccaaaaaaaaagtatgcataagctattagatcatagcgtagtgttcattttgcagtagtcttgtccttgaaccgtactacatgagtccaccatatgattttttttttctcggctatggagttctagttcctttagtctattcttaatttgcagaatatctaggaagagttgctaattaattcccatgtttttggtattcaacagaaacattgttcaacagagatattaggaacaatcattcacaaaatgagaaggtaatttccgtatcaacagttactggatgaatctttatcttttctacttccactgaatagctttttctcccaattcagtgtactctctgattaaaatcgtgagtcattttgaactatatcattctcctttccagattttaatttattctaaaaacggtagaaactcagaatatgtagatcttcttttttttgtacaccaaatagataccttaaagtcagagtatgttttgcgcatatacatagattgtgagtgcttcgctaaagaatcagccgagacatttgctgatctgggaataaaactacaagagaagctagaaagcctattaatgcagataaatatgtcactcagaatatgtagataaatagtttaatttgctgacctttttggttctatgatttgaaattattctctgagacatattcttgattgatcaagttctttttcaccttttatgtccctctttttcccctataattcaaatcagattcttcttttatgatattacatctagttctttgttttttgaaattgataagtggagggataacaacgagactggacatggaagaaagttccaaaataaagtagctcatagtctgaggataataatctttaaatgtttctttggaaccttcattttcatttctttattacttttgtttcttgtctgtgctcgtttcaaatcgagtccattgcattacaaaactctctttcgggcctttgtgctctgccttaattttcttttgttatttactcttttctttgtcagaacaacaacaatatctaggcaaataaaagaggtttttaaattctataatcgttatcatagtttcattatttctatatgtttagacagaaatgttgtcttgattgaatcaaggttcctttcttagaaaaaaaagaaatgcatgtcggctttcatcttacttttaattggaataagtaaactaaaatctttattcatcacatgcatttgcatgtatatatatatgtatacgttatccattgcttttgctaggttcatgttcttttttttgtgcaataatggcttaatttgttaatccagcttgcagattgcaatttgactgcaaagtttccccacttccataactatatgtatgtgatatcaaatcaattcattatgacgagcgaactcttgacaactatctttgtcagtactctgctttatttggtcgtttttattttgcatgaaaaaggtcaaaaaaagctttactcatttggatattgattagtattacacaaagtcttagtttggatatattttctcaaatgtttccactgctttcaacattcatttgctttggggataagtcaaataccttgacaattaactaattccctaactaaatatctcacctttgtttattagtgcttttttggtgaattaagtgtttttaatttatcccgaccccattgtgatcttgttctgtcacatttaattacgtatatttagtagttttattactaccattttgatagacatatattcatgcatgttaagtaccaaacaatttgttgacagtttaggtatggcgtgtttggaggatttgaaaagttgatggagctccaagagaagatccaagtggctcatgtttcttcaggttactttgctttcatgttctattaacataaataatctctttggttggttccttatttttttcttctttatcggaaagttacatattacgttgtttcttagccacgcctgatttgaattaaaggctcactgaccaaaacatccaagcccaacttttgctaaagcatataagcatatacctatgtcagtttccggcgacttttcttttttgctcttttttgaaccaaaacaaatttctagctaatgtagaaatttatactttttaagaaaattactggacttgtaacaccattagtaataagataagatgagacatttgttttgtttatatgaaaatatagtcagtaataactgttttttatgttctcttttcaacttatttttaattctttttggctttcaactttgcttctttttgataaaagacacatatattgttcctaatctttattgtctttaattttgaaaaatgccacaattaaattttgaattaaaacttcttttaattgcccctttaatgttctccctgactcccaaatctacacgaaacactaggaatagagaaaaaacaaccctcgggtaaagacagagcataaaacacttgtagtgtagatataaaagacacacctcagagaagagaagagcagagagagagagagagagagagagagaaagaaagatccaacttccacaaagaaccatggaagctgagaaagaaacagaacaagaaggaaacttgacagtaatgaaacttccggtgttaccaactaaacccaacactcacagccactctatgtcatcaccaattcacagttccatatcagcttcagttccctttagctgggaagaagagcctggcaagcccaagcaacactctacttcttcttcctcctcttcctcttcctcaccattaacttcttattcttcatctccttttgaaactcacaagtccttagagctaccaccaaggcttcacttacttgaaaaagatggaggatcagtaaccaaacttcactcgcctataacagtctttgatggaccttatagcatgacgacatcaaaaaggatggattcaccttcctttaggatgatggtgaaaggtagtgctgattgttatgggtctttcaggagtgatatcgatggtgatttagaggatttggaagtgggctctaagcagcaggagaacttgagtagtggctctttggctgttgtgaagaagagagggagattagggttttttgggtttaggaggaggagagcattgaaagggaaaacagagtttggtagaggtagttatgtgttcccatcttctgtagacagagagagtgaatacagtagaaaggaagaggaagaagaaaaagaagacaaaaggtttggttatgatgatactgatggtattagttgcagccaaagcagcaggttttgtgatgtgaagatctcaagcattagtagaacaggcagcttctctactctgcctgcaccaccttcttcttcttcaaagtctcacttttgggtaagtcctctgttttttatgttctgtttctacatatgtttttttaaagtcgcagaaatgtttgaaaaattagtgttactaaaccctatgaaaatatttttgaaagatcatgaatgagagctttttgtgtgtgtatgtgtgtatatttatatacatatatcgattatgtcctaaaagtggatgtagaataatatgtcagaacttaacattgttttgtggttggatcagacgaatgtgtatgcaggactaaagcaagtggttccatggaagagcaagaagactacagtttgagattctgccatatcaaagattcgaaagataaaacaccaagtaacaagaaagcttctatggtttctacaagtatttttaagcttttgtttatgatttttttcaatatttccaagaaaatgacacgactagtaaaaccattgtgaaacccagttttttttcacgcttgttgttgtgtttgaatgtttttgagacttttgtaaagagaaacagagaatcttacgatgtatcatggcttcatgattatggtacaagggatatttatcatgtttgtaacaaaaaaaaaaagcaagaacctttcaaggctcttatatatgtaaccgtcttgatcatatttgcttccttaaaagctctctaaattgaaccaaaaccaaacagaattgattcccgttaatgattgaaacaaaaaacatatcgaaccaaaaaagttcactagttcagagatttcaagtaccgatcaagattttttaccaaaaaaaaataaaaaattcgatcaagaaaattgaaattgtggactttagttcaaagattttcaagaatcaatcaagaaaattgaagcttctgcgttatcactaaaacgacagcgtactgacgagtttgcgactttttgcttacacgtatcgttggaaacttatgtgtggtggacacagtcgtcccttcgaaattgagaaggccccaaacaagcaagttaacgttatcacaatttcaaagtttgggctaagttaaacatccggcccattttaagctcgttgatatgatctaatctcgtaaaaaaagaataatgtaattttcctttaatatagacttatttactgtcgagaaacattacaagattaactatattttctttcaatcaaggttttaactttaaacacttttaatactaaatttgaaattaaaggtcgtttgattcatttgacaatattagatattttaatttttttttatcgtgtttctagttaggttatagttgtattgtatactgtaatttttatttgcctcgaatgaaaatatgaatatagtatgctaaatatcaactactatagttatggtgatgatgatgatgatgataaaaccacctacactattaagaaaagagagaattaaaagatagtcaaaacaaacacaccactaaaaatgcccataaaagtgaaacccaacacacttctaaactttagcctcaaaatattcttctctctgtctctctctaagtcatctctttgaacatcaggtcagttcatcttcttccctttttctcttatctccttgtttcttctgcaaattactttctcttttctttttcttataaatttcttttgctttttggtttttgtgtttattagggttttcttttcttttcttttcttttgtttttacttttcaatggtctttaatttctttgaaattttgttccctttctttaaaagatgtctggctttttagagatcaactcctaatacctttttattactctcttgctcgatccatacgttagaaagtgattatttgttcccactctctcagatcttttcttgattaatctagattcttcttatcttatacatatatagttccatgtatagatattctctatagtttttgtttcatggacttcaactttttatgttctctcaataagttttattaatttacttatttatttgtatgtgctactttttattagatccacttttgctagcatgcctttatatgcttaattcaatggtttgatcatacgtatacttattacagggattaattactgtaattgaagctcacatcatggaccatcatcagtatcatcatcatgatcaataccaacatcagatgatgactagtactaacaataattcctataacaccatcgtcacaacacaaccaccaccaacaacaacaacaatggattcaacaacagcaacaactatgataatggatgacgagaagaagttgatgacgacaatgagcactaggccgcaagaaccaagaaactgtccaagatgcaactcaagcaacaccaagttttgttattacaacaactacagcttagcacagcctaggtacttgtgtaagtcttgtcggagatattggactgaaggtggctctctccgtaacgtccccgtaggcggaggttctagaaagaacaagaagcttccatttcctaattcctctacttcttcttccaccaagaacctcccggatctcaaccctcctttcgtcttcacatcatcagcttcatcatcaaaccctagcaagacgcatcaaaacaataatgacctcagcctatccttctcctcccctatgcaagacaagcgagctcaagggcattacggtcatttcagtgagcaagttgtgacaggagggcagaactgtcttttccaagctcctatgggaatgattcagtttcgtcaagagtatgatcatgagcaccccaaaaagaatcttgggttttcattagacaggaacgaggaagagattggtaatcatgataacttcgttgttaatgaggaaggaagtaagatgatgtatccttatggagatcatgaagaccgtcaacaacatcaccatgtgagacacgatgatggtaataagaagagagaaggtggttcaagcaatgagctatggagcggaatcatcctaggtggtgatagtggtggaccaacatggtgatatgaatattgtcaaaaaggacaagatgataaagacaaaaacaaatagttacgagcaaaaatatgtgattatatttggaattttcagacccggaagagtcgccttgggaggagcatgatgattcttctttccactttctataaattcctctgttcacttttctttgtcttttgtctaatggagccacttatttggcttttagtttgcttctttaggacctttttaagttttaacacataaatgtctagcccctattattctatgtatatatagtcttatatcatatcatagttttggttgatagagatgaattaattaggtttacaaataaagtacttttgcggtgtttcacgttaataagtataggcatctaaatttaatgagtgtacgtgagacatatgttaatgattttcttcttcttttcgtaaacatgcatatagtccgaaacaaatttggcaacatgcaaacgataataacataatgttatatacgtataggaaatttaaagtttcgtaaactaatatccgtggatcgtgacttaatgatctaggatttaggacggatgagtagtttctagatcatgcatggctccaattagttgttatgtaaatgtttgaatcaattcaattttgtgtgagacttatctcgaaagcaaagtctaattaggaaactaattaaggagaccaactgtccatgaagtcatgaacaattgcgtattgaatacaacacgacctgtaatataaaatcatcattaaaaagtaacatagtattcttattatatattgttattattttggcgtaataaaaagacacgacaatatacctgctccaactaagtaaagactattccaaattaatcacaaatcgttttctcaaattcccactgagattctatttctatttgatttagtttgtttttattcgcatgagaagaccaaagatgacccatgtctctttgcattttttaccaaatagacacacgcatggatatattcatatatttattaaaaagtaactgttattagcttatgcaataatttttacaaaactttgttccgatccatgtaaaaaaaagaagagtgaaaatatatcaaacaccacttatttttacaaaatttgcttagtaacagatgacgacaggacgtgaaagcttaaggcatattgagacagcatagttcggataagaccggagcagcaagttgacgaagcgatgcaatacaaaatcaactctcatacagagtacagaattaactctcaaggggttaatttcaaacctcagattcttgttgtaagttatctttgaaatacttctctttctatttgaactgagtcttgaattcttgatcatgaatatttttcaaattttgtattacttcttaagctagaacttgttacgtggtattttatggtatcatctttgtttccttggctaatacgatattgatgttgaaaattttatttaggtaacacgattaatcacatacgttaaaaacactaaatgcaaccaagaattggaatctattttcggaaccaaaatattcaaatattcttcgaattccatttgaaacagaaaatgagattgtacgtcgttgggtttcccgctttgatatctacccctacctaaaaagattcactaaggtaaaatcatatatatgaatggtagatttcgtttttttcaacaattatattttctctgttttattctcaagaaaattcattttgaaactatattatgagtaggatgcaacaacaaaaatattggatattttggaaggaaaactgacataatcgggaactatacggatggaaacttggtggcatcactcatgcctaataagcttgtaattactcgggtgattttttttgtatgaaacaggtgaaaactatacccatattgagtgatattcctcggcctcctcctcctcctcctccaaagcctttggtgaaaccatcagcatcaaaagggtaagttaatttatttagaatcactacagattatataagagtatatattcatgttacaattttgttattttcttcatatttttacagctcgaagcgaacacagtcgctattgagtttcaggttgtttggtgcttaagctctcttttgaacaagtgagctaatatcaggaaaatctgaaccatgttgatgcttcagttatatttatacgtattatagtttcatgtgtaagtttattcaagttgtgtgattgcaagtataagaaagggaaaaagaaacacaatgtatttgatttttaccattgattcttagtgtaggttttgtgtgattactgattttaacatgttgaagttgaaggatttgttatcttgaagctcaagaaagctcggattcaagtattatggaaccaaacacagaggattaaccgagacgagatttaacatttagctgttgcaatagtacctcttataaagcacttccgattaacataaaatgtcaaagaagaagcaccataccagaattagttagaacaagcaacaaaagtacaaaaccgtgatgtgaagatttgagcatctttttcaggttttggtcaaaattgaatcaaaaaggataatcaataaaacttagatgacggcttggctatctgggacaacatctttcgcaaggctctcatcatcgaatgcatcggattgtgattgagaagctgtcagttttgccgccttgtaactttttgagcttcttacgatatcttgcaggctccccgataacctgttcacaagatgagtaaaaagagtttatgacagtagtctgtgcagctaagattgacaataataatacccttaaacgtttacttacctatttgttcctccagacagattgtttcctgttgaaaccaagactcgaaattagcatatctggttgagagaacatgtgatcaaagttatatttgggtcgataaaataccttgcttcatatgcatagaagaagtcacatcactatcattgtctgatgaactatctgatggtgctttagtggagtcactcgtagtcgtcttagattcatcctcctcagcatccttgaagaaattcgttgtacttttgttcgctgtgactgagttagagattttcttcacagctttctccttgttgttgacattcatcttactcttgttcactgtaaccgacttagagcttttcttcacagcttccttcttgttgtttactgtgcctttcatgggtgcatcagaaagatcaacctttgatccactgcgatcattcttagccattgactgcaattgactagtacctgaactagatggttgaactctaccttttgtctctttcattttcattgagccatcaatggaaccaccaggatgcaaatcaaggcttttcttctcctttttagacttagttccaccagtcacttggtcttgcttgttagcaccaccaacaatatcgtccttttggctagaaccaatattgtctcccataccagcgttctctttctgaacttgcatggaacggttaatatcctcagtattatcggtgacctcaataatctttttcaaaggtgaagcattgctctcggtattttttttagctggcgtgaataatgcatctgtgtcttttgggttgttgatgggagaagcttcctcctgagcaacattgtttacctcaactgacaatacttgggcctcctccacaatgttcaaagagtctttcttctttgatctcttgcttgacttcttcccacttttttccagattttcctcagcttctttcttttgctgcaaagaatctactacttgggcctcctccacaatgttcaaagagtctttcttcttcgatctcttgcttgatttcttcccacttttctccatattctcctcagcttcgttcctttgctgcaaagaatctaatacatttctgataacattatcatgtccttctccatctacaactttgataggttcaacattctgtgcaccagaatctaccagagtatcttctttagctggggtcttggcttttcttgaacttttcttcttagtagacttcacagatttagcctgatcagcatctatcgcaactctttccttaggaacttcatgttcactatccgtaactttacctatgtggtccagcgttttggattcctggacaaaggcatgtggggtgctcgccataccagcaacatgtagatcactcgcagcttgtattttgtctgcaccgataagagtcgcctctccacttcccaccttgtcaaccaatatgtcacccatctcatttccttccaaaaaaaaaatcacaagttatgagttgataataactccctgtgacattaacatatgactgaaaagaagaactctattcgaccaagaatccaatttaccattttgtcttgcatctacaacagtatcggaaagcttctctcctttcgagttaggaatagattcagaagtagcatcaacacaatctatacttccagataccttctccctctcattcacaattatctttgatgttgtagtagcagcagtagatttattgatgtcattctttgaggacttcttttgccttttcttcttctctgtagttggcccggttgtcaaaccactgctaacctccaactgattatctgggtagctcacccgtttatcggtctggatattatctgcagaacttggtatagcttttccgcttcccacatcttccttaatcttctcaccaatctcattttctacacgaacgaaaaaaaccctgaagtctcactgtaaaggtagaggataactaaattcagtaaggaactgaaattacctttgccaagattttctctttgtgatattagacaagattcagaagtagcatcaacacgatctacatttccaggtgctccgtttatctcgttcacaatttctcttgaagctgtggtagcagtagcggcagtagcagatagattgatttgatcttttgagctcttcttttgccttttcttcttctcagtaactggagtagatgtcaactcactgttggccaccaaatgattttccgggtggctcactagagtatcagtttccatattatttgttcccacatcttcgacagttttcacacccaactcagtttctacatagagttaacaaaattccctgaaacataattgtagagaataactaaattcaataaagaattgagattacctttttgtattgcttctacaagaggattttgaagagtttctctttctgggattggaagagatttagaagtagcatcaccacaatctccatttccaggtaattcatttatctcattcacaatttttcttgaatttgtagtagcagcagcagtagattgtttgatgtgatcttttgagcccttcgttcgctttctcttcttctctgtagctggaccagttgtcataccactgctagcttccaactggttatccgcgttagtcaccacttcagcagtttgaagattatcgagagcacttggagccaatcttcttccctcacctctctcatcatcttgtgatgtaatctgcccatctacaagttctgaaacaggtgtactacccttctcttggtcaatcatgactatatcagcagtgatttctcccgtttcaagatctattgaaattcaaaaaatttatcaagggtaagcataccataacgaacagctaatagttcaaaaaaaaaaaaaatcaccttgttctattgctcccgtaagatcatctagcttttctagagctcctttaacagtttgattgtctagtacttccttcaccacaccactggtttgcccatctacaagctctgaattaactgtgagatttttctcttccaatagcctgtccgcaacagaagtttgccgattctctcccatactaatgttgttcatctcgccgctttcaatgtctacagaacataagatattacaaacaaccaaaggtaaatgaactaacactctccaaatagcatctaaagaaacactatccactacattccataataaccaaaatagaggttacctgctccagtgacaacaacatctagcttttctcttggtgaaactgcacaagattgagaggcaacttcaccctgtactttttgagttgtagcagcaacaacagattgatccttagatttctttcgacttgttttcccaccggaacttacaattctcctcttcctcgtctttttctcaacaagttgagtttccaaaccttctccaatagtcaaatccttagtattcttaccatttggaatctcttccttcttctcaaccaactcaaggttttgatcaacatccattatagccaacgtcttacccttgtcaactctaacggcatcaatatacataaaccagtctgtactaatgccatcaaaagccttacacacattcaaagattctgagaaatgataaaactctcttcgtcttttaacctgaaaaataaaataaaaagcaactcatcaattaattgttcctaatgtatgaaacaaagtagcaaattccaattaccttcatcgcagagatattgatttctccaatttctgggaaaacttgtttatgctccttgagtactttgtctataaaccaaaaaccacaataatcagagaaacgcagtaactataagttttagtaagccgattcagtgatgaatttgagaagagagacctttgaaatcggagatgatttcatctttatgcacaggtaacgcgagacgagtgtcgaggttggtttctacaaagacgcagcgaatctccggtgaggaatctgtttcgcgattagccattgttcctgggaaacgaaaaggtttagggttttaactctctgtgtgtaaacttgctctgtttcttctgttcatgaaacgaagaagatgaatcgtttatatcttggcaaaactcggagccagtgttcattggaccgtataatggtaagtgaagcccatttagctacgtaattattgcaaatgagtcatttaatttaatcaaatttattattagagtcaatacttaattctctttacaatatatggaactaaacttttgtttcgatgcatgattctcttggcttggagattaccatcggaatcttcctcacttctccattttcttacgaacttgggaaccatctcgggcctttcacaaatcacacttgatccatatcattaactcgttcgaaccggactgcactcacttctctggcattccctgctagtatctgtctgaacagttaagagaataaaatatgcattttgcagaatgtggtagtgcaaagagaagtagtactatgaatctatgtacctctagtctataaacttggtgcttctccttctgatcttgacgctcgtgtttaccttcgtcttgttcatcattctcttaaggcctcacagacaaaacctgagactgtctcatactgaaaagggaaacaaaaggatagtttatactctgccaacaagcaatcttaaacatatcggttctgctttctagagggctacagagtatattacctctgaatctcctcttattcaacccaaccttgaagaatggcaacaagctgaaactaggatgagcttacctttgaatccttttcatcaaatctttcaccaacaatagctgctttcaatggaagactctaccttgtaatagaccaattattaagttgttcatcgttacaatatcccaattagcattagatacattgacgttaagaaaatcctcataagaaaaaccaagtacaagcgatattaattcataataaacattcatctcaacatagattgtgaaatgttaaagccttaatgacatcatgcattagaaaaccaaaaaacctcacgattagaaaaaacaggaaacaagtttcttaaactagaacaagctagcattaaagttcagcaactcaaaagaagatagaaatgagatcaatgatgctcataatcgagcattgtttatctcagatgacaaatacttaagcctcctccacaacgtccgaagactgtttcttcttcgacttctttgttgatttcttaacaactttctccacattctcttgcaagtctcccataacaacatcgtggtcaacgttccttgagctagaagccacttcagtaacttctttagtcgaggccttgtcatcagcatcttttccaccattgttctttgtaccaacctttttctctacacagattcagcaatttacgagttaatagaaacgtcccacgttatatatgattagagaaaataaaatgaatattcaacaaggaactgaaattactgtttggcacaggcgccattaatacaagaatattggtaactggcttcttttctcctgtcgagtttggaaaagattcagaagttgcatcaacaccatcatctttgttgatcccttcgttctcaacatcagcagattgattgatgtctaacaattaagcagttaaatgattaattgcagcagttggaactaatcaaggcttatgtaacatcatctagaaatgaaaatccgtaaggttagctgtaaacataaacgtttaccttctactacacgaacatcatcatctttgtgactctcgttctcatcatccacaagtgcaatatccgtagcaacacttttttctcccttttcaaggtctattgatcatataaatatacatatattaattaagggccactctaaaaacagaattcaactattgttataagctaaaaatttcgtttttagtagttttgcttatgattaatttgtgattcccacgcaacatagctaattcagtttctatcactagttcaagagtaagaccacctagcctctttcaatgtcttaataaaatcagatcatacaataaaaggtaactcaactactgtctaatactctccaataacaacaactaaagagttcatagaccataataaagagaaaaacagaggttaccttttcctattgcaaaaggttcaaccactcctttaccacttgactgatccacaagagatagtttcttacgacttcttttggcactatccaaacttttcagtttcctctttttagttttatcaacatccttaatagtcttggtctctctctcaagtaaattagggtttgacaacggagtttctccggtcagcatcttacccttctcctcaaccctcagcacatcgacaactagaaacgtttctttgcttgggaaagccgtgttcaaaatgagagagtcaactaaatgataaaattgaccaccacatttaacctataaaacaaaaaaaaacaaagttgttgtttcttaagcaagaaaaatgtcagtgggtatgaagaagaaaacattgttaccttcaaagcggagatagtgatgtttccaaaacttgggaaacacgtttcatgctctttacagattttctctgtaaataaacaaccaaaaagaaacttagaaaagaaatgaaactgaaaaaaaaaaaaaacagagattatgaagagtcacctttgaaagtagaaacaatatcatctctctccatgagaacgcccagacgagtgtcgaggttggtttctacaaagacgcagcgaatctccggtgaggaatttgtttcgcgagtagccattacttcgaaacaagactggaattggaaagagacgagcgcgaagaagatgaacaagaagttcttgggaaaacgaaacggtttagggcttctttagtgaaacctttgtctagctagtggactattaatgcaaattgacgtcgttcacgaacagcatagtggactattagtaacacttaaataggcctaataaagcccaaattatagtgtcatatagattagagatttggataaatataatagaccaaaacgtaacgtaattaaacctgcactgttggacttgtttggcctattaaggtaggcctaatcgcccttttaagaatatccgactggcccaaagagatatgcatcggtgtcacgtagttattacttagctcgtacgagttgtattgcatgtaagtcagattagcgaacgactcggcattcataaaaggaaactatcgatttgtctatgagagtgttggaccacgtttaaaaataattcaggtaaatgtagttttaaactatcaaatttgtagaattattatatcttttaacttgtatttgaaaacagtattgatatttttttatcaagaaaataaaaatcatcaaacttccaaatgaaaaatgaaaaaaaaaataggagacaaaagaagtaacgtgatatataggacgtatgactttgttagccactttgatccactaaaaatgttgtgtcagcaaaatccgaaataatccatgagaagttgagaacagaagtcaagagcttatttagtatccataaatcacattgaaatatatttttatttgttaaacttgaaacattaataattttatttgcaaaaaaataaaataaaataaacaaaaaacttttttttgttgttccttaggaacaaaaaaaaaataacttattttatcgaaaagaaaacatcatatatttattttatgtcatgatatgttcatttgatattgcgatatagaacaaaaataaattctgcctattgttcaatcaacatttgcatgccgatgatattagattttattttgcgaaatacaataaaaatctttataaaaaaatctatttcaatcatgacctaattccaacacgatatatttaaaaactaattcgataagacaaaataaagttaaaccgctcttcttatcacatcattaaccaaaagtgataagctgaagggaacttcataaatattcacaagacccaatagggaaacccgaagtagctaaagtagtacaaaaaatttcttcaattaattttggaccacacatatgaattaaaaaaacataaataaaaatcttgtttagtgataatatatataagtgcgtccacttagggcaagataatattttgatagggagcccaattaaattaggtctcttatgatttggggcacacttagtgacctaaattaaagttaggttatagatgtcaaattttcttctaattggtttgtctgtatatatatgttacctctcaagaattgtaacttttgatatgtacattattaaaaggtagtgcaagtcaaacgtgccactttcatatatattttgatatcacttggtgcatgtaggtatattttttttaaacgaatgaaaaaataaataatacatcaaataagactaataaagttatttcgtcatgcagtgaattctctaatccaaaaaaggagtatgcgaagggctttatttgcttacgacaatccacttttcatgtgttttacttaattaacgtgaaatcatgtatgtatgtacgcatgcaaatatgcaataaacactcaaatatatatatatatatatatatatattgatatcactttagtggctagtgtctagtgcatgtaatagttaaccttttggttgatggaatttgagtaatgagctactcaatcataaatgatatcaatcctttcaaatttcttacgagtatataattgtatgaaacgaacttacaatatatttatatgatagactatagtacaagttagggttgattatataccaaatcttggatcgtttttagatgtgcaattaatgtatatgaatcaaaacttcttatctcttgtgacattaaatttattatctaatttttgtgactttttttcgatgatataaaatttatgacgttgcaatgaaatggatggatgtacgaaggtttcaacatcagtacttatgcgatgacgactttgtagcacaaaatttaacaaatcatataaaatttcaattaggccacttcatcttttttgcatatcaaagtgggagagagttatcaataatatatagtagtagataacaaataatattagttcaccacttaaaatcagttcaagaattttcaaaagtagtaaagtcttataatttctatatatgtaacactccaaattgcattgctcatcaaaacaaacccaaaacattcttaaccaaaagactcattttgttcggaagttctggtttagggttaaaaattcaagttctcgggtataataatatggcaacacaagaagcagggaagctagagtggaggataagtgtagacaatgggacaacagagagattggttcctagatcgggactaagtaaaaggatctttctttggctaaaggatttggtaatgaaggtgatcatggagcgggtagctaagtttatgaggaaagcttggaggattggggcagatgatccggccaaagtggtacattgtcttaaagtaggacttgcactttcattagtctcaatcttttattacatgagacctttgtatgatggtgttggaggaaatgctatgtgggctatcatgactgttgtggtcgtcttcgagtccaatgttggtacgtaaacaaaacccattttcagaattttgcaactttcttcttcttagttagcgaaattgacatgtatgtatatgtatctccatgtacaacaggagcaacattctgcaaatgtgtaaacagagttgtggcaactatattagctggatcactaggcattgctgttcattgggtcgccacacaatcaggaaaagctgaggtttttgtgattggatgctctgtttttctctttggtaataatggccaaaaccctaacaagaatcagtctttattgcaaataacaaaaaagaaggatccatctttattaaatttctcttgtgggtttgattcttgcagccttcgcagctacttactcgcggtttgtgccgtcattcaaagccagattcgactatggagcaatgatctttatcctcacatttagccttgtctcagtaggcggttaccgagtagataagcttgttgaattggctcagcaaagagtatcaactattgcaataggaacatctatttgcattatcattactgtcttcttctgtccgatttgggcaggatctcagcttcaccgtcttattgaacgtaacctcgaaaaacttgctgattcgttagacggtaagggaataaggaaaccaaaattgttatgacagattcagcattatagctagagtgctgactgttactaaaactgcaggctgtgtagcagagtactttaaggagaacgaagtctcaacgaatcgaaatgaagatgaaaacactaacatgaaattgcaaggattcaaatgtgtactcaactctaagggaacagaggaagccatggtaacttaaacagattatctatggggataaagaaaagttcatttatctttttgatttgcagccgcttattcggttttcgggtttttctttctctcaggcgaatctagcgagatgggaacctgcacatggaagctttaactttcggcatccatggaagctatacgtaaagataggggctgctatgcgcagatgtgcttattgccttgagaatctcagtatctgcatcaactatgaaacagaggtaaccttttagattttatcatagttttgaagaagactaactttcagagactgtgaaactaaaagtggtgtcttctgcttctacaggcaccagaccaggtcaagaaccatttcggggaggcatgtatgaaactgagctcagcttcttcaaaaatcctaagagaattagcggatatgatgaagaacacgagaaaatcatcgaagatggatttcctggtgtttgatatgaactctgcagtacaagagcttcaagaaactttaaaaaatgttccaattgaaaccaataagcctgaagaagttccatctgaagaggagaacaaagtagacagcgaagagagaaccacgtccatgagcctacatgaagtccttccagttgccactttggtttcgttgttaatcgaaaacgcagctagaattcaaacagccgttgaagcagtcgatgaactggcaaatcttgcagatttcgaacaagattcgaaaaagaaaaccggagacaacaacactaaacaaccaccactaagttcctaaatcactttcaattacacatcgaaaactcatcatacatgaagattttaaaccgaagaagttttcatgtgtatatataagcctttagtgtatgattttgcttagttctgtatccgaaattttcttcggcatggtttcaacttttaaggctaaaagcaagtgatagaaccaaatcttgattggaatctacaatgtatctagagaatccttatgtcgccatggcaagcaagaaagagatcaaggaaaaataagatcgtgactaaacattggccaatgttctgtactttttggtgaatattatagaatatgtgttcacctggaaatgctggtgtcacaagctttcctttttctcttgagaggtttaaggccaaggttcagagctaaatcctcaacaggaaccttgatcacatcgtttctaacaccgatatcagtagcatacctactcatacaatacatcccagcagtgacagttgctacaccaacaggatttggaatcaacaatgtgagaggtgacgagagtagtgcagctagaggagcacctatgatagaactggcttgaccacttctcccaaccccgttcttatccagaatgagcaatcctgtcttgcagtagagagcaaaatcttcgcagttattctggaagacattgtagttaccaaatccgttttggagaaggtgcattgctctatggatgactgtttgaagcgggtcagatggagcagttgtgcacgtgccaccgcggaatctggtgaggaaaatcgatgagctgactccataatcaaaacggtagagagaacctttcttgagaaagcagtctaggcaagaaagtactactccactctttggtcgtttatatccacagtcaggatatgtaggacaaggagcttctgaagaatcattaacctctgaaactgaagaagacgaagaagaagaagaagaagcgagtgtaggagatatcaagctgtgctcaggtttgaaatgaaccactttgcaaccaccaacaaatacgcctacaaatgtggaaaatttagaagaaaacaaaatgctttcttcagttgaaatgtcaacaaaagcaatcaaaatctatttgctaccaccattgactatagaaggacaagtcatcatcagtacgattgaatccagagaaaacaaaagatgagactttttgaagatccgtttcaataaagtcaaaaactttggcatgagggaaaaagacctaataacaaaacagagtttttgacacaataacccaataagaaaccaaatgacggtttgtttcttcatctctgcaacggaaagaggtaacataaaccctaaaatttacacaaagaagatccaaattgaggaaaaactatggatgattcatgccaaaagctcattgatgatgaaatcaaaaggaagaaatcgaaggtaccgtggtgagaataagcgaagacggctcgataagtgtagatgtgatcaccaggtttaagctcgtctctctcgactttgttcgtgagtacacccattgcttcgtcttcctcaaaataaaagctttccctttggcttgtggaaattgcagtgtacaagtagattcttacgtcagcggcagagatatgattgggcgatcaaaccggagactgttgaaccaatgccgttacagaatcttttgacggcgttaactgttagatgacgacaatcgctgtggagggtaatatggtcaatatacgaaaaggcttttgtgaacacgacgccgtttttaaagtgtccctggaatcttattcttcctttcttggtgtattggactcatattgggcttaaagaaaacgctctacggcctaaatatcgaaaagcgtattatttatctatcaaccaattgttattttgctcattgccaactaatgaacaatgcttagaattaatcaaattttctaatctgaacgaaggaagatataagtaggagttttatacaatcgataattgtatacttaattattattataagctatattggttaatgagtttctttggagtgagtatataataagaaaaatatatatagagccgagcgtagtggaggtagatcaggcaataatggaagaaacttcgaggaacttcgctttttgttgtaaccacaaaagcgaatataacaattaatacggtttgagtaggcttgcagattttcagacagcactcctactgacagatgtttgaaaattaaaatatttattgcgattattataacaacactgtagtaaggaacttttgggttatttcattggtttattaaagtctttaatcgttgactttttaatttcattattatctgtaaactcgtattttaagtgattttaataataataatttgaaagtaaaatggaatatcccccgatatcaagcgagccgtacgggaaagggaaagtcaaacatgtaataacagttttaaatgaagggtactacagtcttttcaaggggttaataacgttccgttttctttatggacagccaatcagatgggaccacgtatatcactattaccaaaccttcgcttttctggaaagtggaaagcaaaaccacagagagaagagaagaagaacaaagcaaaatatattcaaaatttaagcaataaaggcaaaaattaaaagacaacgagtttcaaacacgaaaccacgacttgtccaaatcaagatttgtcctttttcctttttagtggtagaacgcgaatcaaatttgggaataaaattttacttcttactttttcaaaaattcttgggtcttcttcagctttgtctccaagcaaacttttagtcaaatcatttttttctttcttgatggactttctttcatgtttgatatttcaatgacgaaagctctaactggtttttcttggaatttaggtaagaatttatactctgtttctctctctgtttaactcagttcttgttttgggtttctgggtttgtattttttttagatctttgattatttattatgttctatgttgtaaaagatatcaaaccgtcaataaaaactgtaactttatttgttgtttaaaaattgatatttcattgtttgattgaaatttttctacaggaatttgataaacggtttctcacatacacaagaagaaaataaccgttttgagttaaagtaaagcttttgaaccaatggaggaggagaagtcgttctcggcgtggtcttggtctgttgagcaatgtttgaaagagtacaagacaagattagacaagggtttaactagcgaagatgtccaaatccgccgtcaaaagtacggttttaacgagcttgctaaggagaaaggcaagcctttatggcatcttgtattggaacaattcgacgatacgcttgtgaagattcttctcggtgctgcgtttatctctttcgttttagcctttttaggtgaggaacacggctcaggttcagggttcgaggcctttgttgagccttttgtgattgttttgattctgattttaaacgctgtggttggtgtgtggcaagagagtaatgctgagaaagcacttgaggctcttaaagagatgcaatgtgaatctgcaaaggttttgagagatgggaatgtgttgcctaatttgcctgctagagagcttgttccaggggatattgtggagttaaatgtaggagataaagtccctgctgatatgagagtttccggtttgaaaacatccactttaagagtcgagcaaagctcgttaaccggtgaagcaatgccggttttgaaaggagcgaatcttgtagtcatggatgattgtgaactgcaagggaaagaaaatatggttttcgctggaacaacggttgttaacggaagctgcgtttgcattgtgacaagtataggtatggatacggagatcgggaaaatccagagacagattcacgaggcgtcgcttgaagagagcgagactccgttaaagaagaagctagacgagtttgggagtagattgactacagctatttgcattgtctgtgttcttgtgtggatgataaactacaagaactttgtttcttgggatgttgtggatggctataaacctgtgaatatcaagttttcattcgagaaatgtacttactacttcaaaatcgctgttgctctcgcagtggcagcgatacccgagggtttacccgctgtgatcacgacatgtttagctttagggacgaggaaaatggcgcagaagaacgcgatagtgaggaagctcccgagtgtagagacactcggttgcacaactgtgatctgttcagataaaaccgggactttaacaacaaaccagatgtctgcaaccgaattcttcacattaggcggtaaaacaacgactactcgagtgttttcagtcagtggtacgacttatgatcctaaagatggtggaattgtggattggggctgcaacaatatggatgctaacttgcaagctgttgctgagatatgttcaatttgtaatgatgctggagtgttctatgaagggaagttgtttagagcaacaggtttgcctacagaagcagcattgaaagttcttgttgagaagatgggtatcccggagaagaagaacagtgagaacatcgaggaagttacaaacttttcagacaatggtagctcagtgaagctaggtaagttttagaatgttttcacaccattacattagcacaatttcattcatctgctatgttgttgattgattgatcttttctccattcttgctgcactagcttgttgcgattggtggaacaaaagatcgaaaaaggtagcgacattagagtttgatcgcgttcgtaagtccatgagtgttattgtgagcgaaccaaatggacaaaaccggcttctcgttaaggtaaacactaaacaccattattacttctcttctcttgtttttggtgaagaacgttttgtgaatctcccctttctttttctttgcagggtgctgctgagagtatacttgagagaagttcttttgcacagcttgctgatggatctcttgtagctttagatgaatctagcagagaagtaatccttaagaaacattctgaaatgacttcaaaaggattaagatgtttaggattagcttacaaagacgaattaggagagttttcggattactcttccgaagaacatccttcacacaagaagcttttggacccttctagctattcgaacatcgaaacaaatctaatctttgttggagttgttggtctaagagatcctccgcgtgaagaagttggaagagcaattgaagattgcagagacgcagggataagagtaatggttataactggagataacaaatcaacagctgaagctatttgttgtgaaattagattgttttcggagaatgaagatctttcgcagagtagcttcactggtaaagagtttatgtctcttccggcttcacggagatccgagattctgtcaaaatctggagggaaagtgttctctcgagctgagccaaggcataagcaagaaatcgttaggatgcttaaggaaatgggagaaatagttgccatgacaggtgatggtgtgaatgatgctcctgctttgaaacttgctgacattggtatcgccatgggaatcactggaactgaggtaattaactaactaacttatgtaaaacaaccttcaagaatcacaaaatatgcagattctgatacttactatatgatgatgtacattttcaggttgccaaagaagcttcggatatggttcttgcagatgataatttcagtactatagtatcagctgtagcagaaggtcggtccatttacaacaatatgaaagcttttatcaggtaacaacaaaaagccttccattaggtcatgtttgtactactatttcctctgtaaattgtactgatcttgtggtttgaaatgattctgttacaaggtatatgatatcatcaaacgttggagaagtaatctccatcttcttaaccgcggcattggggataccggaatgtatgataccggttcagcttctttgggttaatcttgtaactgatggtcctcctgctactgcgttaggcttcaatccagctgatattgatatcatgaagaagccaccccgcaaaagcgatgattgtctcattgattcatgggttcttattcgatatctagtgattggttcttatgttggagttgcaactgttggaatctttgtcttgtggtacacacaagcttcattccttgggattagcctaatctcagatggacacacattggttagcttcactcagcttcagaactggtcagagtgttcttcgtggggaacgaacttcacggcgactccttacacagtcgcaggtggtcttaggaccatcgcgtttgagaacaatccttgcgattacttcactctcgggaaagtcaagccaatgacattatcactcaccgttcttgtggctatcgaaatgtttaactcgctgaacgcgttgtctgaagacaacagtctcttaacgatgccaccatggagaaacccttggctactagtggccatgactgtctcctttgcgctacactgtgtcatcctctatgttcctttcttagctaatgtgtttgggattgtgcctttgagtttcagggaatggtttgtggttattcttgtttccttccctgtgattctgatcgatgaagctctcaagttcattgggagatgcagaaggacaagaatcaagaagaagatcaagacaatgtaaaagtctgatcaacacaaaagacaaaagacagtaacttttttcttacaatcttttgtttcattaagaaacctcaaccaaagacacagttaacctgttattgtttttaaattctttgtggaagctaaatcaaactttggatttgatataatctcttttacaatcttttgtttcatcaagaacaaataatttattacagattctctcagattccattaaaacatcaaccaaagacaagtagtgtaacatttcttaaagaagcaaactttggattagatataatcttttgtatcatcaagaaacccagacaagtttttttgagaccaattcattacagattctctcaaattccattaaaacatccaccagaatcccagatttacctcttgcaatcaacatcttgaccaagcccttgaagtgtttaccaaatttacctctctcaacaacatcattgactaagaccttgttcctcttcttttcttctcccacaagaaactccatcaatcttctgacatcttcttgagtccgaccaagacaattcttcgattgacaaacgctaacgagcgccgcagcaaaccctgaggccgctttatcatgcaccggaggaggaggaggagtaacaactctcgagggtttcgtttgcggaagatgaaacgagattgctttgaggaaattagggtttctgttctgtgagtatgatgctgaagaaggtgaagacgatgttggttttgaaagattggtagatgaagcagaagtggtggcgtttacggtggatttaaagcggctggagatggatctcaacggtggctgcggtggtggaggaagagaagggaggttcaaggatgaaacggatgctgagagagtatccatggctgacgataaaatgaaacaattgcaggcctttcacattttatccatctcgaaataactaatatatatctttagatctcatacgtatacgtatacgtaacgtacaaaattgaataactgccaaaaaaaaaaatacgggattagagttattaaaaaatctaagttgattttgtataaaaaaatctaaagttgattttgcacttaaccacttttaagggttttagtcattaatcatgcattgtataagcgcaaatattaaatgggcctaatctttataacaaatgggctatttttgtatttcagaaattaaaggtgtctgattctgaatatgatcagtgaaaagtgaaaactggaaagtatctaaaacgacaaaccctacttttgtttttttcgtcaacgacaaaaaccctactaaggtcttaaaatatgctaccctcgccgtctgtgcatatggcgtcacctccgccgtctctgaatatggcgtcacatccgccgtctccagccacagcctcacgtaaacggttggttactctcaaccattttcttcaaattgtgatattcaattgtatcgaatttgagaagtttgatagtggggaaaattggtttgaatcagaaatgaatctagtttaacatttccatgaaaatcaatagatcttatataattgaaaacaaactttgttcttataacgtttctctttttttttttttttttggttggatcagttgttgaaatattagaactttcactttgagaagaatttaaagttgattgttttgcagatttcaagattccagtaaaaagatcatgaacccgagtttcgctgacctaccatcaagcctcatagaggagataatgttacttcttgtcttaaaagataacatacgagcatcagcagcttgtaagtcatggtatgaagctggtgtctctgttcgtgtagtcgataagcatccttggcttatgtgttttcctaaacgtggcaacttgttcgagttccgcgaccctttacactggaagttacacacgttggatctcccagagttagctgaatcaactgtttgttactcaagattcggttggttacttatgcgtaaagcttcatcaaacgacgtgttcttcttcaatccgttttctagggatatcataagtttgccaatgtgtgagcttgattttcagcagattgcgttctcttgtcctcctacatcagatgattgtgtgttactagcgataaagtttgttccgggtgaggttaatcgtgtcactgtcagtacttgcaatcctggagcaactaaatggattactaacgacttccctacttttctgagattgttttacatgcaaagcaaccttgtctatcggagagatcgattctattgctttaacgctgaaggaactttgtatagctttgaaccatcttatcgtgaatggagttacatttgtgcggataaactcagatgcccgtatgtccatgagaaccaatatatgtggtgtgggaaagcagttttcttggtagagaagaaaggagagctctttgtaatgtttacatgtagcaacgagaagccaatggtgtataaactattctctatgaagtggaaggagttgagtaggacaacacttgatgggatgacattttttgtcagtttttataactctgagttgaggaataatctcccatggatgaggaacaatgtctatttctcaaggtttggttacaatcgcaaacattgtgtttctttttcatttgatgaaagcaggtacaatacgcctaaagaatgggagcaatgggtagaactttgtcctcctcaaagcctttggattgatacgccgaagaatgtgttagactacttcttgtaagattttcataacaattgagaaatgttttttttattgggttagatatgattagaagtcaggtttaattgggaacttgggagtcatcatcactcttgtgtttttgtttaccagaactggttgctgttattgtaaaagtcttcttcttcttctaaagttgacattggactctttctgattctcctttgcaattgtttagagacaaatgtttacattctctgcaagaccttcaaacattgtagagcattgacttaattcggctttgcaggttaacactcattagctgtttagttgtacataggtcattagcttccctaactaatccatgcatgatctcttagagcatgcccattgattgaatccttataaaaaatccttaacattttttaataatatattttggtaattttaaagtttagagtttttgtttagtctctaaattttttgttatccaatggtggagtccttatgaaaatttctttaaaaagcaaaaatatttttaaaataatttatttgataaaacttaaaagttattagaaaatattacaaattgtaaacatatatgatgacataaaagcaaaaaaaaagagaaaaagaatacaaatcaaaaggcttacaagaggaaactaaagtccaagatgagaggtctattaatgaaattgtcaccaaaggaagaacataaaataatctatctccagctcaagacactgtcatgaacttaaatgaaagcacgtacctagaaccaattatttgataacatcaactaaatgagcaaacaaaagagcataaacataaacctagaaccaattattttgtgtcaccaatccgttgtaatgctaatgagaagtgaataagtagcaaaagggtcacatttttatcttaaaaaccaacagatcaaacacaaatttgaacataaaccaaagcccagaaactctatacgaaaccaagagagaggagagaaagaagaaaggaaaaaaacttgttttgttttattggtcctccaatgatatagtgccacgtcagcgaaccttactcacccaaaaataccttattcaaggttcgcaccttggttaattagacaattttgatttaattttttgcttcttttcattaggattctcttaagaaacttgtaaggtccctgcaatggacatgctcttagtcaccaaagttttcaactgtacacatgtcacccgaggcgaaagatcttttgctatttcaataagcggacaagtttgaataaatcacatatcaacggaaactatgcaagtgttttgtttattcttgttataagtgtggatcttgaaaacagcatcagattattttttctgaaaagaaagcattggaatattatagtaataaagggagagctttgtatcaatgcttacagggttttctttgacaaggtgtaaaactctctctgcttcatttttatatatgtaccttagcttccaaaatgtttcagggcataaagttctcaaagctaaatccacttagttcatcttatgccaggtagagttacaccagagagagtgtagtattcagttttggaaccgttttgctggatctcctgcttcattctttctcagtgactatgcaatgttatgaattctgctcttgagggtcaattctcaaacaaaatggaagctcagccacatgttgtctgcagtatgaagctcgagaaagaccaaatgtgaaatctctcgtcacttcaattgccacactcaacaaggaaaatctgatgtagcttcatatgttcttatgggtattaacctgaacataatccaggctgtgaacatctctgccatgtatccatatgtggatttgtaaccatcagagttctctatatgctcagtcagtaaatgatcatgtttatctagtcagtaaatggttgtgaaatgtgattaacactgatttcatgatatccatcttttaggtatcctttgaaattattgtaagttgtcaagccttgtacactgaaagccgatatcgttttggtttgtcgaccaattctattatttagttctcatttcacttgtggcaggaacatgacagatcttccattatgaagaaggcagcagttcccatcgagtctttagtcgaaaatgaagatgccattaccctacttgtataattaaatacttagatattactatgcttttctcggttgtttgtaagccctttgacgtgctatatatatcctctttcaggataagtcagagacaacctctcaaacaacggactcagatggcaaagacaatggtgaggaggtgaaagatgtacaagaaaatgtcacagttgcaggcagtaaaaaagacccccttttgagaaggcaggagttgctagtccgcagtggccttgctgaggtgtgtgtgatgtggtgactcgtttctaagtttcttggttgtttctgatataatgttgaacctcctctttttttttctgcagttcaaagatactgaaaatcttcaagtgcgtgagatggaaggatgagcttcaagtgggtgtggtgaacgaaggtgctctaaaatcccataaacgaaaaatccccgaatgatgatgtagggttaatgtgaaactatgttttttgtacagactagagatgatttgtttggtttgttttcatgcagcactaaaaaccgctgtacgaaactcaatcttttttgcatatatttcactttagttgatgttatttactgattctcataattgaatttttttccaaaaattttttaaattaacaaataaaacaaatatagtaaacctctataaattaataactttgggaccgcaaaattttattaatttatagaggtttcaatttatcgatagagagattttcttaattttctaattttttatttttatatgaaaatattatatttctttcattatataaaatatacttttagaacaaattataagtaaaaataataattatgtctaaaaacaataccaaatttttttgatatagtaagaataatagagctaaattcaaacaagaactaatacaaatttaagaagaaaaaaaaaccaatgaattctatatcattgaagtttattacatataatatatatttatatatatagttgatgtatttatacaattattaatttatgatattaaagagaccatacgtttatataaaattttcaaaaaagttattatcttattaatttatcgatttgtatcaatttttacattggtcccaactcgggactgaaagaatttattaatttatcgaatattaatttatagaggtttaactgtagtcactgccacgttcaggaattggtacttagaatttatagttttcatggttacttgtctaattcgcatcgagaacttataattttaatggattcttctctaattcgtctcatcatctgatcaattgggactaattctgtttatatgttttgtgcaatggctttgaatcttcgtaattcggatcatacaggttctttatttagcttcttctctctttctttgtttctatttatattattgagagtacattctttagatttcttggtttctttgccgctatattgttatatatatatatatatatatatatatataaactttcaatctagggttctaacgctagttgccacaattccatttcaattagagaaattcctaaaaatagcactaaaacaagttttatgaacaataatagtacaaactacataaacttccaaaaatagttgacttactatgaagttttgttttaaaagtataaacctctataaattaatactcgataaattaataacttttataaattaaaaaataaaagataccgataaattaataagatattaatttttttgaaatataaatatatggtctcatcaataccataaattaataattgcataaatatatcaattacctaaaatacaataatctaaatctaattggattgaatttcaaaatatgtaaatcctatttgaaagcttttggattgttctactagatacatagctggacttcgtagctcaacgcagcttgtaataaacgacaacaatgtagagctcctcggactcgccggagaagtatgtagttaacgaatttttttgtttctattttttgtttttctgtttttaattttaatttatgtttaatttattttttaatattgataagggcaaaatcgtctaaatataattcattaaaaaaaaaggatatgtagagtaaaaagagattttagaggtttgttgtgttcaaaaggagacatgagaacgcttactcaaaaaattgtctcccaagttgacgttttaagttgggcttttaaagtaatggcccaaagcctattaatgtctccctaggccttgttaataattaattcaagacgtcctagtcaactcttacattgttgaacttgaacgtattgcaagtttgttagtttgttttcccctgaaatgaaaggtatacgaacacgtgatttgtgaaatgacataaaaggtgaatccgatacttttctttttgttaccaatatacttagtctcaagaaggtatgtttcgtgtatgttaaagttgtctcctctcgttcatatctattttagccaaacatatgcatacatttctaaatagtttatgagaatataacactaatgtttaataatcgacaatctcgccggagattccggttaggaaacttagctagacttgtccaactgcggcaaagcgtcagcagccaacccccacgaaggactgttcaagaaactttgtctcaatcaccaccacagtcaccgctatttcatccacaatcaccaccggaaccaaagtctttacccttgtcgccgttatcaccaaaatcaaaggaagagcctgaatcacagacaatgacaccactgatgtcaaaacatgtcaaaacacatcgaaaccttcttatccaatcaccacctaagtcgccgccagaatccactgaatctcagcagcaatttctagcatcagtgcctcttcgaccgctaacaacagaaccaaaaacaccattgtccccctcgtcaaccctaaaggctaccgaagaatctcagtcccaaccgtctccaccgcttgaatctatcgttgaaacttggttccgaccatcgcctccaacatcaacagaaactggtgatgaaactcaactacctataccaccaccacaagaagccaaaactccaccgtcttcgccgtcaatgatgttaaacgctactgaagaattcgagtcccaaccgaaaccaccgcttttgccgtctaaatccatagacgaaactcggctccgatcaccgcttatgtcgcaagcatcgtctccacctcctttgccgtctaaatccattgatgaaaatgaaacaaggtcccaatcaccgccgatttcgccaccaaaatctgataaacaagcaagatctcagacacactcatcaccatcaccaccgccactgttgtcgccgaaagctagtgaaaaccaccaatctaaatcacctatgccaccaccatctccgacggcacagatatcactatcgtctctgaaatcaccaattccttctccagctacgatcaccgcaccaccgccgccgttttcttcaccactctcccaaactacaccgtcacctaaaccatcgttaccccaaattgaacctaaccaaatcaaatctccttctccaaaactcacaaacaccgaatctcacgcttcaccagagcagaatctagtgaaacctgacgccaacctcatgaacaagattccggctaaaaacgaagttccgaaaaacaggggaacattagagaaaaaaacagagccaatgattatgatgttcataaacagtaacgtccaaggattcaacacttctctttcgcttgattcatcttccatcgatcataaaccaggcgtccacttgacgatcgattatgatcaaagttgtgatttttcttaaccactgttttaaataattgcacatattgtaatacaatcgtctcttcgtatcactattatatatgatcaacgttgtgatttttcttcaattctgttcccggatttaaactacttaagttggcgctggaaaataaagcacaaaatgggccttaaatttaaatttagatataaagattacaagctttgggccggcccattaaaccatgattttgggatgtgttttttcatggtaagaagcaatttaaaactaaacaagtgaaaagtgagagaagagctaactcactgtagactactaattgatctggccacgacatcttggaccacggtttccttgtcccctaactatatagactagagtcctttgcatattttaacgcaacatgcataactagaacttaattaccgtaatgtattttgagtttacttttaagttataatgttatgttgtttttgtcaaaggaccattcgtgtaaatataatcgttcctgttcgcgattcgcggggattagaaaaggagctattgccttgtccttattgacccacgagacttaaagagcgcatttataactcatacctggccagctcaacatatatcatactccaaaacattatacactatgaattttatttgcatgtagatatttttgacaaaaaaaaataaaattactaaccaagcaaacacaattatacttctgttaatgcactggtggtatatgtattaatttttttaactttctttttgctaacaaatttgtattatttaaaaatacacttctgattctaatatacagttatgaaaagaaataattttattttgttattgtgtatatatatatacagctgttggtcaaactgatacagtaaaaatgtttaacgaaaagtcaaatcaaactacaaattcccaggatgtgtacatatttcacttttcaaaactaaaaatagtagtaataacatattccatgatgttgttttgggtcaaacgtagtaacattttaaattgacgtaagacaatcaaaacttaaacctacaacatgtaaattttcagcctaaataacagaggctatatgtaaatagagattattctttttgataaaattgcaaactaataaataaataaaaatgattcaaatactaaacaagaaaaatgtattcaaaattagaagctggatagcatcagcttgaagagcatagagacaaacatgcctcaaaacttgacagcatgctttatttgtatttattacttccctaattacaatgtcaccaaaacgtagtcgtcgccagactatctgcatgcacatacacatctgtatttattagttttgaaatagtaatatttaatgattttttctattttaaaaatataaaattatggattatttcaaataaccaaaaagtttggtttaagaaaaagtatggtgaaatattgggagaactatatagttaaagaaatgaatattgtgaaatatacttaaacaaaaaaactactatatattgggaacatctatggggtttagacagtggcgtgaagttccaagttaaaaataccccatgccataaagaaacaagagtaatgtattcccgttgaacaacttttccactaatacttccaattagcttagacctcatgattctacaaatttttcttgtatatgtgcgcatataatcatgaattcaaaaaaaaaaaatatatatatatatataatcatgaattcatgatcgatgtatatatatagttattaaactatcagatatacatcttaaattccatcaaaaatattatgaggttacacataaacgtataaaataaattaatgtttttttaacaaacgtataaagtactccatctttgttaataaaatctatttttattaacaatattggcgattgtaataacaaaaaaatgtatactgtatttttattactcagctacatatattatagtctaaattcgtatttgttaggcaaaaaaatcctactatattatttgggaagtacattttaaatgtaaccttaatttatgtaattaattacatgacaatgtcattagaaaaatttaatcaaaaacagaatcttttaataacgtcattaaggttaccaaaatcatttaactacaatattcatttttttattatagggcttattggatctaaagacgggtcatcaaagatttcctaaactaaagcaaaatgtaccgaatatttaaatatctatatgttaccaaattataaacaaataaattcgtaaaacaaattaatattttatatacgaaatcaattaaatcttaatcacataaaaattagcacaaaaaaaaaatattcaacaattaaaaaattatcaaatctctgtgttatataagtttctatactataatcgaataaagtgtaatataccttttcaatttgtattctttaactaatttaagctaattaatatatttgctaatcttatacctatcaaaaccgactatcgtttcttatctctatagtatttttgcaagagttttttagtggatttaggtaaaagtgcattcaggtcatatggtacatttctttattaagtaaatatggtgcactcttatgttattagctaaaatgtttagattataaatcatagtcatatcataaataaaattaatattaataaaataaatggctttttggcaagacggatttggagggacggatttttgattcatcattaataaaaaagtaaaatataattaattcaccgtttcaatacgggttcaatctttaatttattattttttaagaccactaatatgaaacatatcaaaatcatcctaatttagaaaagattatataaaaccaaaaatgttatgtggtatgtataatgttactatatataaaattaaactataaaatataaatgtattagagaatgatacaatttacaaaacttttatatataatacataattcttaaatttttaaaattactactttaaaaaaaatcacgggacgggtaaagaaattacagaacgggtttaattttggaattggattatattgtggatgtatttgaatcaatatttataaaattttaaaatgttattaatatgttgttttaataaagattaaaacttcagttttttaacaattgtctcatggatttgtcgtatagcgttacttaataacaattataaactgtaaaatataaatattttataaaaataaaatttgcaaattttaatatatattacttttaaaaaataaatcattccgcggtataccgcgggttaaaatctagttaagtatgtatagattaattgaaacgtgtatgtactgataaagtgggaacttggcagtgtacctaaaaagtaaaacaaaaataaatatgtttctacaactggtcatcctcaatgtaccccaactactactctgactattttctcttgccttctttatttctcagtttcatatactacatatatatatatatatataatatatatatatatacttcgtataaatgatagaccaattatatttttctggataacctgaattggtataacgaagaactaatggtttagtttgattatcgaatagccacaccagtttaaaaatgctacgttttatacagatcggatgcatggacgttctatatacatataatataacttcgttactttagagaatatgtaacggtaatgtatcttcttaagattttcttttttgaaaatatgtcacaattattattttattttagtttagtttttagttttaaatatgtcacaattagtaaagaaggaattagataattaaccaaaaaaaactactaataacaaaattacatgtcggctgagtaaatactgtttttttttctaagaagacaagactagggtttcggaatgacgacttatttcagccttcttaaaagcccatctcttcctcttatccccatcattccctcatcataacaccatcatcaccatctctttctctctctctctctaagatcttctatcactttatctctctgtatatataactcacataagattgagctgcgactgataatcatgaagaggctatttctgttgtggggaatgttgtttggatcgaggatatcataaacgcatacacatgtttatatgttatgatgcattatatgactgatgtaatgtacatatatatacatacatgccacatggtatcgtcggaccaggcttcatccccctcaacatgttaattgccttcaatcactctggagaaactacaaaaccttgattattagatttttattttttggtttgacaatgtatatatatacataatatggtaactaccattggcgtctctatcttttttctcttaatttttagttgtttatatgctcattgatccaatagaccaataattatgagttttcatcattttttgcactatgtttactggtccctaataaaatttgtattctacacaagtccacataaagtaaaaattgtaaaccattttaaatttgctaacgtcggattgtaatagcatattttactaaacattttaagagagttaaaaagtcgctttatatgattaccgattttttttttttgtgaaagtaatattggtctaaattttttaagtgaataattcgtatatacagtagttgattaagttagaaagcagtcaatctcctacataattatatacgtacgtgtttagagacagtaacataaagtttgttttgtttgttaaaaagcagcataaagttattaattagtcaaacattttggcgatttagacttcctttttttacagaattacatatctacataactaaagtagcttttattttattttattttttagttttcattatactgcaagaacatattcttggctgattgcaacttattttgattttccgtcgctaaccaaacactagtatattaggtattacgttatattcttttgatcaaactaataattttcattgaaattataagtctcaaatttactcataagaggaggaatctgatacgtattaaaaatgcatttggccgctcaacatgctataaatatatatatatatatatatatatatatatcgtcacatatatttcaaaataacctgatacttttacatatttgttaattcctgaccacacattttaagtttttaacgtcgtaaaaataaacgaagttgatgacgttcatttctaatttagcaatttatagtgcgactgtttaataaaatacaagattcccaaaaatacaaaaggtattttgatcaatagtacttcctaaaataaaatcatgtttcaaagctttataataataataaaaatgatctctcagttacaattgtcttgtctcacttgattattttctgtaaataagtttggatgtgaagttattcagtacaattaacctaaatatttaatgtgattgactaaaactagctaaatagggttcacgggaaattgaagcttttgactatgggaaaatatatcaaaaaagattgaaaagtcttttgtttttgctttgtcaaagtgctttatcttcttcatgtcacaccttttcctagtatttatgaagatgtgacatcttctctcaataattcaatcgcgacttcctaagtaacataaatgcacatgtgcgctaatatcggatgttgctgacttccttgaatcaaaaatttgtgttgctcatgaattttttcttttttaaaactgatttaatcaatatacatgaaatagttcgattcagttgttgctttataagtacggactaggcagagaaaacaaagaaacacatctcttgatttcgatcaacaatggctgcttttacacacttgaatatctatctgcttttgttgataatcagtgcaatgtgatttggttaatttgaagcaaaataattaaaaagaaaacgagtttgccaaacatttaattctgaagagaaaaagtattaggctattagcccacaattaaccaaagtattagcccacaaataacaggcctgcacttgacggcccatttaaccttttttttttcctgacaggctaagaaaatatctttcagaaaattataaaaagtaaaaagcatatggcataatatatttttttttttcaagtgggaatttacctataaaataatattccccacttagatattccaacaatctatgaggtttggcttttttgtacaattaatttgcttgtccccatttaaaaagtgtctctttataattatatatcgccaaagatttacgcatggattcgtttttcgataataatatatcatctatttctttaaaactcgattaatgcactattagcggtaacgcaaattactggcaaaattcaagttattataatgtttctctcaaatatttttgtttggctgaatgagaaagatgtattagacattgtcttctttagacattatatatatttactagtactaattatagtaaatatacacacgtatacaatcggagtagatgcgcatgttaattaccaaaaaaaatacgatttaagtgtgccatcatctccgttaatctagggttagctggataattatcatttacgttttgatgatgacaaaaaaggataaagaacaaaaaggtacatactaatatatacatatatgtaaggttaaagtttgtttgatgagtgcttaaattcgatattctatttaaaattatatctctattcgctaaggattcaaattcaaataagagaaaaaaaataaaaagtaaattatgcccaccccaaactttgctatatatacaagaaatatcaccttctctttaaaaccaattaaagagacgcatttaaaagcaaatgaccaacaagcgacttcaccatccatctcttacaaccctccaagaacactggctgttttccttcactttctagacaaaacaaaaaccatcttctagagaaaataaaccaacatgggagagacagaaaccatggcaacaaactaactaaaccatagtatatattatctatactaatattatcggcccatgggtaacggagacaaagtcatgagccactggagcttccacatcccacgtctccatcatcatgagcatgatcatgaaaaggtaccaaaagggtgtttggcagtgaaggtaggacaaggagaagagcaagagagatttgtgattcccgttatgtactttaatcatcctttgtttggacaactcttgaaggaagctgaagaagagtttggttttgctcaaaaagggacaatcacgatcccttgtcacgttgaggagtttaggtatgttcaaggattgatcgatcgagaaaacactagatttctcggtactaatctccttgatcatcaccatcatcatcacaaccatctcatccggtgttttagggtttgatgatattgttttggctctttttaaactagatattatctcatgctgctgattataaataaatctcggtcttcatttcatcttatcttaaggtgtggcttgttgttgttgttgttgttgttgttgttgttgttgttgttgttgttgttcatatatatatatatatatatatatatgtctcatgatgattaattgtacgcttatgcccgatcataaaaatagaaaatcatcatcttgtaataatattaaaataatatgtatgttgaacaattaatatttagttatttactatactcaatctcttctatgagttgacttgtcaattgaaattttataattttattaatgatttggagaagaaagtaattttacatttttccatttttattttaaaaatcatttttattttaaaaatcactttagttcaggttttttgttgctaaaatgtaaatattcataagaataaaaatgtttaggtttacagttatatattttagacttatagacttggtcttatggcaaaaaaaaaggattaaaacatggaaggaaaaacaatcagtttgtcgactcaacgtatgctatgaagcaaacaatgttagagaaaaagataaagtgatacaagattttgaagttcctccaaagtgagttacaaaagatgaaatttggcaatgaaaatttataaaaacttcaaaagtggaagcctttcactggaggccaatggactgattctatcggctttgccaaactattctacaacaggttaatcatttggagaagaaagtaatttagtggttatttcacatatataccaccattcatcaatataacttctatgttacgtttccgttcataaagatatgtgaaaacgaagttcctgtaaatgaatgattaagttaagaaatttattcgctaaatctataaattcatctgatcaacattgttgtctacgcaattgttgttcattaaatctttacggtcacaaaaataacaacctcatgatatgttagaaaaactttaatcatacacttgcaaaaaaaagtgaagcaaaatctaccataaatatgcaattgtgcagtggtcttctcctcttaattttgtttgaagtacgtatattcgaaactttatttcgattataatttttcgtacgattctttataagtaaagcaaaataatgatggattgaagaatcttgaaaatggaaagaaatggacgagaggcttttgaccatttgtatggccagaataacaacactcactaccaaatacaataacgtgattttgtttaatagattagatgcggtaggaatatattattcttcgtgaactaaaaccatgttttataacgacaaaaaaaaacccatgttttataagtttatgggccaaaattgggcttttgtattataaacatgtttacggaagtattcagctaagtatatataaaaaaaaacaattacactaatttatttaaattttattattacctacttacaattagtaaaatttaaaattaacaaaaaaaaaacttttacttacttttagttattgttttaagaaaaaacatcattaattaccctacttttttttttaatactaggaggttctaagccaaaacatcttaattattatattgtttatatgtctaataatatccataaatgtattaaaaaaacttaaaacataaactaaagggtaatagatcataatattattgaatggagtaagaaaatgtataaattataattcaaaaagagaactataatctgcttttctacccaaatgaagtaaaataagacatcaatttgcatttcaatggtcagttttaaaggtaaaattaaagacgttaaacacgtgtaatgtaaaagagatcactcatgagtcatgaccaaccatattcttagtttatataagtaattcacaccccttaaaaagaaatatagtctataatcaatcatacttagcatgaaaacgatgatcaagtttctgctgttaatactggtgatctctcctatgtcgatatgcgccgagaaggacatgatgataaatgaatgccacaatgcagacgtcccagccatatgcatgcaatgtcttgaatccgacccaaactccattcacgccgaccatataggcatagctggcatcgtcataaactgtcttgaatcccacctccatatcatcaccaagcaagttttcacttacaaattataaccaatatacagaaatatcctctaatatatcaattttttcatttgtgtagtaacataacgaatttatcgtcaaagaaagataaaggtgaagtgaaaacagctctggagatttgcaaaaaagacttgtcgacgaatgcatctacaatactgtcggaagccaaaacaagtttgaaaaccggtgattatgataaaaccaacaaatcgataaagcttgcgcttggctttcctctgagatgtatgttcaatctcaaacgtgtcaagttcacgtctccccaactatttagtcaaatcaatatctatgctcaactctctgacgctgctatgaggatcattgatcgcttctaataagtaataactccttattgttttctatataactcaacttcgatcaatgcttaccccaatttgaataaatcatttcctttatgaaatttataaagtcacatatatccatttgttgtagctctcatgttttttttttcttttcaaatttgtcaaaataagttttcgtttgaaccatcattcaatataaatctaaatgatatattgtcttttttttttttttttttttggcaaagaatgatatattgtctatttcatcaaagttggaccactatacgataaattgttgttcttataacgttaaagtaggaaaacagttcagttttcacgtgactaacttactactattggaatatttatcataaactttaattcacgaaaatcattaatgaaaatttgatattactactataatatcgtcttctctattaatttagaatcttattcatccttttccacttgtcttctctaaccctctaaattctctttggtcgggatcactggaaagaaatgtataatctcactttctctccatcattgtcctcttctttgctctcttttacacaacaaactcctgcagccatagtgtcctcttctcctccggatttagtacttcaacaaaaactccggtttgtcgtggaaacctcaccggaccgatgggcttatgtcattttttggcaaaagatgtttgatgatcaatcggaccggtcttacttggtttgggttgatggtcatttctgtggaaacaagaacaacaattcccaagaaaatgttcatttttctttgcctcttatgttatctaatcaaaatatccaaaatttatttaaatcaacttcttaaaaaagttctattaagaaaataatataattttccttacccttgattttttgtttttgtttctttcttaagtatacaacaaacagcatcgagtgtgagctgatgatggacggtggagatgatctggagttgttctatgccgcatcgttttacggtgaagatagatcgccgagaaaggaagtatccgatgaatctttggtttggttaaccggtcccgacgagctccggtttagcaactacgagagggctaaagaagccggttttcacggggtacacacattggtctccatacccatcaacaatggcattatcgaacttggttcgtctgaatcaattatacaaaaccggaactttataaaccgagtcaagtccatattcgggtcgggtaaaacaacaaaacacactaaccaaaccggttcttaccctaaaccggcggtatcagatcattcgaaaagcggaaatcagcaattcgggtcggaaagaaaacggaggaggaaacttgagacgacaagggtagctgcggcgacgaaagagaaacatcatccggcggttttgtcccacgtggaagcggagaagcaacggagagagaagctaaaccaccggttttacgctctacgtgccatcgtaccaaaagtgtcacgaatggacaaagcgtcacttttatccgacgcagtttcgtacatagaaagtcttaaatccaaaatcgatgatctcgaaactgagatcaagaaaatgaagatgacggagacagataaattagacaacagcagcagcaatacgtctccgtcttccgttgagtaccaagttaaccagaaaccttcaaaatcaaacagaggctctgacttggaagtgcaagtgaagatcgtcggagaagaagccataattagggttcagacagagaatgtgaaccatcctacgtcggcattgatgagtgcgttaatggaaatggattgtcgtgtacaacacgcgaacgcgtcgcgcttgagtcaggttatggttcaagatgttgttgttttggttccagaaggattaagatcggaagataggcttaggaccacacttgtccgaaccctaagcctataacaatttctttgttttgtgacgtcaacataggatgtgataataatttttgtttttttttgcgaccttttgttttatttgataagtactagaaaaatcaaattccttctagcgattaatgttgttttatcaaaagtttgatctcgttgatacgtagtttatgtgttacttttttactttatttctcgtacgtacgtactagctcgctaaaagcgcaaagtgtttggtatattgtcttactaaaacaatatagagactgtatattttaaaagaaacaactcattaattgatcatttggaaatattagtttgaaaaccatagagaagacggaggaattatagacacacacacgcttgtcctataatatttaggaccactcttcagtgatagcttgctaacaaatcaagtcaattacgtaatgaactaccaatgctttatattaattattcttggacgtactgttatattaagacactgattggttaatttggggaaaaaatattagtacaatgcacagaaaaataaagggtacaataatgttgagaaaaaaaagtggtacaataatgcaaagagaagaaaagggtacaataatgcaattgaattgtatctttcttattttgtttgctaattactaattgcaaaaaatgtttttgtgcttgaaaaagtaatcattctgtatctaacattcacatataaaacagaactaaacaattttgcatttacttaatgagacaaaaatgttttgttttatttgatgatcatggttttatgtttttctaaaagaaattaaaatatgttatgcaacaaactatcatgtgtctatgtatacataacctatgatacaatatagtttcgaccttaagattaagtttctttgacagaaagtcagaaacagttatctttcacatgatcccttcttcaatcctgctgcaacgatgtaacggttatgcaaaaatttactgataggtaaatcacatgaaaaatggccacatgcaaaaattatgcccggttccaacttctaggttaatatggtactcaacaacaaaaaaaaatattaacaataaatacgtgtttgtcttcttcttctttatagatgtttcactttataaatagactgtaagtttttaaaacgcaataagaaaaacaactgaaatcattttagaaatcttatgcgtgcagaataaatattggtgttatgtgcatttgaagctttaggctttagcactttctaaaacctcgttttgagcaaagtcattcaaaaggaactcttaatatttttacaaattgaaatagcaattgtaatttaatcagtaaaacctctataaattatcatgtttattaatttatagagacaatatttgggctaaaatatcaatttgagaacggaagaaaattattaatttaatgagatattaatttattgaatattaatttatagatttttgactgtatatattctaagctttgttttaagaaaatttaatccgtttaaaaagatttatcttcattaaccccaaaagaaatgatttgttttagcttggccaatagtcatgtatggcccaatctggtataaaatctcataaaaagttttatcttcattaacccaaagaaatgatttgtattaagatgggccaatagtcaagtgtggcccaattaggagtaaaatctcataaacgaaatgggcccataatggcccaatatttgtacaccacaatcggaaaccccttttgggtcatttcaagtttgacgagaaacgtaaatcgctatttcttctattcctccctaaaaatctaccaacgagattcttctcgaaaatttcctgcgcctctccgtgtctgtgaaatcgattcaggtaaatcactcttctcgaatcgatgcttgttttgtgaaataccgattctatcagatctatttgataaatttgttgttgttgttagtcgtctgtgtagtttattcaccttttgtttcgatttttgggtcctcacgagatctatgaatcgttatctgaaacaaaactcgaaactagcagatgatatgttatttagcgcgattaggaagaataaaacgagatttgttggtagcagtgagtttcttagatcggtttttttatcgattgtgtgaaaaaattcaccattcagatgcttttattgatttgtgtcttctataattgaattgaattgtttgattcagcagcttaattatctaatggttttatgtgattgtattggcttgattagggttgaatatgccttgaaacttcatttcaatcccactatacactatagctataatctgatataagttcgttttctccttttgtgtggcttgattatgtttgatatatctatgtacttcaggttaaggatgtcgagagctacatacattatcggtgcccttgcgggatctgcggtagtagcttacgtgtgtgacaaagttatttctgatgataagctttttggaggcaagttttaaaccttataaagctacttatgatgtatccagaaagctaaatttggtttggtttgttttgaactctcaggtactacaccaggaactattactaacaaggaatggggtgctgcgactgaagagagattacaagcatggccaagagttgctggtcctcccgtcgtcatgaaccctatcagtcgccagaatttcatcgtcaagtcacgtcctgaataacttttgatgccttctcgtgcatcgttctcattcgttatggattcattttcgaatatctgctcttttgtgtttgatttgaggatcggctgattgctctagctggttatagtaataatttgtgttgatgcgtaacacattattcggatcaagcttttccccgatgcataacttttgtaaggtttgttgattttgacgataaatgaaatcgagccaaaaagaaaaacttctaagacattattggtttgtttggtttggaattttgttatcgctgattctgtaaacatttttaaaactgttacttttcatctcaagccttggaattaattatcacacaaacctggaggcaaactatcaggtaaacgtgattctaaacccggttcatacaccaaattgaaccggtgacactaataccatacaacaacatttaacattgtacatgtgaatgtgaaccattccacatccatctaggaactgaaactcaactgtctcagaacccttttaacagagactaactcataaaatgacaaaaccttttttttatatcatcgtgaagaaagtaaaaatgaaaggtagaacctaattgatatcaacaagaagcatcacttattcttcctctatttcattttccttcagtttttgcatcaccaccgccatgtctagcggctgagccaccttgcccatcagctccactctggctcatattggtcccatccggtttacctcctccactagcatcgttaggacccgcttttggtagagaaagaaggtgaaaatcagtaatgtgataataagttccaaactgctgtaaaaccaaatattaccattgtttgcggcaagagcagtttcatggtggtgcatttgatgttgcagtccgttgttattattcaaacccattggtctaatccccatgtgcccttgcatagcttgttgatgtaactgttgctgcggatccagaaactgatgcgggctaccaaattgcaatggacctctaggagggaaaatcccaggaggtatttgttgagccattcccacagcttgatgttgctgcatgaagtagcttggtggtggctgcattgatgacggattaggagccatctacagaaaccaaacacacacaaactataagaaccaaaatgttttgtttttcaactgatcaaaacagaaacttactgcttggggagtcatggctcctgatgttagtgtagctgctggtggctgaggttgagcatccgcaattgcagcgagatacatcaaattcttctggagaagagcttgatacctaaaagaatcaagcaagaaccatgttttattattaatattctatttaccatcagtaaagctaacatagctcggtcttggtatcgagaatcccacacttactgagcacattctgcaagtttaccgaggttctgattttccaagatcgccattatcagcttcttgttctcatcaagatactgcaagaagcagcaataagtgactcactgtgtcaacatgtcatcttcacaatctgattttaagctttcaaatctcatatgcatacaaatactctgttttcactcaaaaaaaaactccaaactcatgattgtacatccaattccagtaacaaaaaaaagttaaagcggaaaacaatgacactttaaaacaaatcatactcaagaaggaaagttcattacaacagtttaaactactcaaaaacatcattacacaaccaatttcaaagctacgataaacagacattatgactaaacaacagaaagacaaaaaatatagaaagtaaagtagtaaccttttggatctgttcggtggtgatattattggtgggcggaaatgaaggaagaaccatcggaatcatctgtggagattgctgcatcttttataattcaccaatcaaaactctgaaacagtgaaaccctaaagtttcttctcacgattattacaaaacaataattctgagtgatagaattggtttaagagcccaatgcaaaacaaactgatgcaaaaatattcaacaaacgaatattttggattatccttaaatttaagacttttgatttgtttgaatttcgccgacgaggtttctgggaaatcgtaggacaaaaaagtcccccaaccaattaatttgtctcccccaccgaatgtacacgtggcaccttgtctgatttttcgtcagctctacgataaccaaaaaaagacaacatttgtagctgttattatttattgggcctgttaatgggccttataaagaattatgaaagcttctgtgtcaagaagaaggttactttaaatctgtatcaatatcagctccacgacggcgattcgtcgttgtcctccgaaccaagcaaactccgatccctcaccgtggctccggatattttacggcggttgttcccggctcggactcgaagaattgtccggattctccctttgaccaggctggagatgaaccttttccggttctgctccggtctgaaagtcctcggctatttcatgatccttcttgtcgtcgccgtcgttggtgtatcttactacgccgtcgtagttagcacatggtggccgatcttgatccgcggagaccatggagctttatccgccctcgctgccttaatcatctttgttttccatttcctggtaatttccaagtctcataatttcagattaggttttgtttctggaattgtaagtctaggttttctgctacttaacccctaaaccttaaacttagggatgtggcatgaaacttatgtagccaagagaatgagaaatgcaatgtagttatgaagcatgaagcagtgtagatacataatcattgtttagaccattgattgttagtaaatgtttaggctccctgagtttaggtttacaattatacttctgatttgcttggttctttgcagctgataatgctgttgtggagctacttcacaacagtttttacagacccaggttctgttcctgagcatttcagaagagaaatgggaggtggtgacagtttggaggctggtacttcgacagatcaaggagcttttggctctttaggttactgtaccaaatgccggaatgttaagccgcctcgttgccatcattgttctgtgtgtaaggcgaaatctgatttgtttatactatgttctgcttgtgtttctactgatagagaaagaaagctttattcggttctttgtttccttatgtaggtcaaagatgtgttcttaagatggatcatcattgtgtttggattgtaaactgtgttggagcacgcaattacaagtttttccttctctttctggtaaatattcatttccattgtagtctcttatggttcttaaaaggtttaagcgagcattgggattatttgatttgctgatttcttcaccctctttttttaatttgtagttctatacttttcttgagacaatgttggatgttattgtcttgcttcctagtttcattgaattcttcagccaagctataaagcattcttcttctccgggtaaactggcctctctcgttctggcattcggtgagtataaacggttctttttctcgttttccttttcccagaaagtgcttagcttttttctgggtctcattttccgtctttatgtttcttacagattctatccccttgatgcagttcttaactttgcgttcgttctcagccttctttgtttcgtagtcatgcatatttctcttctctcatccaacactacttcagttgaggtaaatcttttatgttcttgctttcacaaacaatctaagtcttgaaaatatgagtctcttctctgaatcattgtcttatttttttaggttcatgagaaaaatggagaagtcagatggaaatatgacttaggaaagaagaaaaacttcgagcaggtgagattttattgttttcatcattccatggattgttagttaattaaatatataactctttgttttcatcttgtgaaggtttttgggaagaagaaggcgttttggctcctcccattgtactctaaagacgatatcgataacataacttcccttgaaggccttgaatttccaacttgttctgacatcgacccttgattgaaagttgaaacaaaatcaatcaatcatattcgaaacagccttcaactgcactccaatgtagataactctctactcaaaaagaattctcattgccaattgttgttgtattattgtaattgatttgattcatttctttgcttcttgttgaaagtctaagttcgtttgacatcttcagactgtaatgttatgtgatgagacccagtgataacttgttgtataagtaaacaacgttgcacaagggctagggaaagcaaaaacaccaaatctgatggataattgataagagtattattcagaagagaaaaaactaaaaagtctcataatttaaagatcgaatcactcaatcctatccccccagcagtctccatatcaaaccagaaaccataaggtttcgatttcatattttataacacatgagagagagctttttaaagttctccaaaaacaaactacaaacaaatcccaatacacttctccttttctttttctacttgcttatttttctctatggttactagtagggtcggtaccttcggcctcctcggttaccatcatgttcatgactgttatctctgcctgaccctccgcttgagccgttattccggtcatttcttcttggtcgttgtggtggtgctgctgccatcggcataccaggctgttgcctgcacagcaatccatattggttatttattaagcgaaagtaaatatgaatcaatagagaaggatcaacaaatttgtttacaagaaccatcgacttacagaacatagccaactcggccatcgggaagaagcattggaaccatttgcatccctgttggcattgctcctctaccatagatcattggctgctcaatgcaaaattaaaaccaaacgttacacaaaacaatggctgataagactagtcaaggatgacaaacagctctttcttagaaacatatatacctgactaaaactaccggcaatacccaaaccggcacccatagcaccgtaaggagccgcagcaaaaccaccaaacgtgggatgcacaaagggggcaggagtaggtgcagccccgtaagaataagaagaagggtcatgcttcctttcagcctggggtttagcaagcacaacttctagtggttgacctgtagtttgcaagtttgtggaatgtgttactcaataacatctcttgagacgaaaaaacatacgccattagagacaaattgatagcataacgttcataatactcaatagctgtcttctagatgactaaaaaaacttaccattgacttcatatctctcggtatctttgacagccttcaatgcactagatctttcagcatagtggacaaacccaaaatcacgttttccaccctttccaggaggtgtaacgattttggtcacttctccatgcctctgaaagagttcctttagctgctctgttgaggtattctctggaatattcttgacataaagggctttcacctgagtatataacgcaaaagagattgtcaaaaaagtgccaactttgccaggagagaggtttttgtgcagattgactaaaccctctatttaaataatacctgagcagcagcagcagaatgctcaggagagctttttgggtctgcccaagtcacagttggagcgttaccctcaagcttaaaattagaatctatcattttctgtcttgaataatcagcacatgcattgttatagtacaaaacaaatgcaaaaccacggttacgagtggtatttgttgggtcctacaagtaacaagaagataattagtaaggcaattaagtaagatcaagcatggcaatcagattgattaagtcatctaacttttatgagctcgatgttctccactccaggaccaacatcctctatgacttttctaaactcatcctcagtccagttctttggtatgttaccaatgaacaacctattcttcgtttcggaaagagagcaccttatggtttttccctgtacaaaaattaggtataggttaaacaaaattgttataagtaaaatgcaaactagcaatgaccgataaacttaagctacagttagcagttgagcttgccttaaactctttactgtgcaactcctcaatggccttttgtgcaacgtctttggttttgaaagctacaaaagcatagcctttgctatcaccagagtccctatctttcatcagtctcacctaatagaaaaggaattaaaattcagtcgtaaatacagaaccaacaaagagtatatcatgaaacacaaagattattgcagttcgaacctcaaagatctcgcctatctcttcacatagatccctcaggtcctcttctccaacatcccttgggagcccaccaataaaaacttcagaaccatgaggaggaagtgaaagaaggtgggaatacttttccctatcttcatcatcaataggagatggtggtttctcatcatcatctgctgtctcaatatcaatatggttgtcgtcatcttcagctatttcctcctgaacatcttccatatccccaccttttgtatcaccataatcctccacctcacgttcttcggcattctgattgccaacgtcatcatcatcatcatcttcttcttcctcctcttcatactcttctacttgttcctcctccacttcatcctccatctcactgtagctaccctcctcgaaatccacacggtcatcattatctcttgcgtctgacatctggtcatccaataaccatactcttttttaaccacgaagctcaggtaatcactgttaaaaaaatgctataggaccatacaccaaaaaaaaaagcttataatgggtgatatgagaactgctctttttcgtttaaaaaaatgtggagaagaaaggatggttcaaactaaattcaggttcttttagtggcagagatacagaagaattgtagttcattgctatcacgaaacaagcgtcaaatgagataaaaatcaaaactttgaaaaagagcagagtttttgtgtatgtatatatatgattccagatccaaattgataacagagagaagaatcaagccataaccgaagcaaccaatgaaattagagatcgtaactcacacatctctccagaaagcaaattactcaccagttaagctcagaaataaaaatctgaacttgaaacagtctgagaaagaaactagggtttatccttttttttttatattgtttgggggagggtaacaaaatcgaagaagatgagaagtatttatatgaaacaaccaaaacaaatgtataagaaaagtagaaatggagaattttctcggcataccagaccgtgtttgttttcgaattggggaaattggtatttcgtgttgtgggaaattagggatttcgcttcggttgtccgacgaatactgttttactcaaaaaacaaaacttcgtcggctatttctcgatctccggtagaagaagatgaagacactccttacccactcgtgggctatgatcacatgttacgcacacattaaccctaaatcaaaacgctttttaagcccactgtttttattgggcctagtgttttctagttctttattatacctgtttaaaaaattcgtgattttgccagccctgccgttttctttggtgatatgaaaactacgtgctgttttaaaattattccatttcagaagcatttaatttatatttaggtggatatagagtagtagtgtataacgtagaagacaagactgatcatgtaggaatcatgtcacatgggtaatgttccttgctcgtggatctcaagttgcaaagttgcagcttttttttatggttttcttaacaacttcactttgcatgtaaaaacaaataaggccagtgaaaattttcgttattttatactaaaaagattccatataattaacaaagataccatgacagattgataaactattgttcacatcctaattgcaacatttatagataaaaatatgagcatacatatttatatagagattagttagtaaacacttccaattataagctacaaattcacacacacaaacataaacacaaacaaaattacacaccaatctcaaagatcatcaataaaaactgaaaaagttatggttctttttgtcaaattgtttttatttatatataacaaaaaaaaaaaagggaggaaaaaaatcatgaccggttgatttggttggattatggaatcatcttaaccatcgcctataatcgctagtagaagcaggtgatatctctccaccaccaccaagagactcagtacaacaagaagagtaatttgattgttgttccaatgcacccaattgtgagccacctatactcttgaaacttggactccttaaactctgaccatccatttgctgcggcagcggtggaactggaaacgaaagccgttttctagctgaactgatacgttctttctcgggtgttgaaggccgttgccttggtgcactctgagaccggattctagccttagcagattccgtaatcgccatgtagtttggcaatgcagcatttgtagcagtagtagtagtggtacaaacactataaccacttcttgctgtgaaactatagttagatctcaagctaggtgtgtttgatgtgtagttgtacgctgaccgatcatctctttggatccgcggactagcggatcgaatttgtatcggtctagatttagccggagatggtgtagctgatgagaaattgtgttgttggtaatggtggctggtccttgatggtgaactaggcctttggctacggcttggacttgcaccggttctcgagttaccgcgggttaaatacggttgagaagtatcgatctccacggttttgtaaaccggtggtactctttgatccgttgaagctcgtttatcccacggtttagaagccatccatctgtctaaccatttcggtctctcttcttcatactcgtctcctgtagaataactacctcttgttctccgaacctttcaccgaaatcaaacaccgaaacgaatcaaattaccgaaaacaaacaaacgattaatatgaattcatatctattacctggtgagagaaagcttgtgatatactattgttactctcacgtctcaacgcattgtctcgtctttgttgcaacattgctttcacttcctcaatcgtgtgtggtcgatcatcccaatcttccgcaatgctacttccttctcttgactacacaacaacaaaaaaggcatttcaaaatgttagctttatatagctgattgctgaaacagagcaaaaatggtcgttgaaacagagcaacaatggtgttctgaaacttatagagatcactcaccatggatcttctgtctgatatttcttgaagataacgagattcgagcacactttgagtgtcgctgaaggcagatttgcgactaccatcgtgagacaagcgtttccgttggtcaagcacacgagattggactcgaactagagcttgcatacaccttaaagtcatctttgcttgcttcctcacattgtgacctctcactagtgcttgtaacttcactagccctttcaatgctcttaatgctcttcttgcctatataattcaaagttaaatccaaaacctgtttgattactaattaatcaaatgtagttaagggagaattttgctcaccaaatagcctctgaaaccagtttggattacaacagctgcgtaatcttctcttgcggtataagtacgtcttgtaagatttggtaactccttcgttgtcgaaggaggatgagtttccgatgcggcggagacggtggccggcggtgtagatgcgtcgtacctctgttctgtaacagaggataaaacggttgggttgatgatcgtcgttgtttctgtggatttctgcgccggagcgtcttttccgacgccggaggtcttcaccggagagtcatgattcgtagattttctaaataaccaacgtctcttctctttcttctgcagaaacagagcatatgaattatagtaatatacaaaacagagaaacaagaaacagagcatgtgaataaaaaaacaagaattaagaagcaagatctcgagactagagaaagtatacgaaccttgtcttcatcttcgtcgacttcattaccatgagcattgttgttgtgttctttcttggtgggagatcggaaagctcgtttcacggcagtgagccaagaagaagaagaaccgctcttcttacccattggaggttaggtaggatttaagattctcaacagagtcaagacatggtagtagtagtagttatgttcctgttttgggacatagaagagaggatgagagatttggtttagattcttgcgcagaaatgaggaagagagagaggagagtggtgggtggatcttgggaaacagaaatgtcaataaatttggaaggttgcttaagggagacttctgactctgaccacctctttaactgcgaccatgacagcgatgactcttcctcttcatttactttctccacttcatttattttgttatttttgtttaactcatttcactaaactagttatatcacattattattattatatcatgtacctacttgcatttgttgtacattcaattctagaagatttgttgctgttaaattgaaagatagagttttgttgttttgagagttaattttaaacaaatacaatataaactaattctatttcattatgcaaaacaattcttctttcccttggttcgattatgcaattatatttcatacattctaatttttgggttttcttaagatatgcatgaatattattctacttatatatatatatatatactagataaggcccgcctaagatataaatttattcaaatatgtattgataatatttaaaatttgaatggtaaatagtgatccacacttttctaatgttaaatttagtaatttttgaattaaataaaatttcaatcatatacattcaattttactatacattttaactatttcttttatcataataaactgccttttaactctatacactccaacttattgatgatatttgaattttaaatagtaactcatatttttttcagtatttaatttagtatttctttaaaataaattttaatcttacaacttcgattttacaatacaatttaaatattattttttatcataatagaatacaatttaattcgattgtatacaattcaaatacaatccaaattttcaatacaaatacaatttaattctatacactccatcttattgttagttttcctttttaattaataaaattataagttaaatttttagatatagaaatataaattagtatatgtaaatatgtttatttattttttaaagaattttttttgacatatgtcaacatctcaatgatagacctgacacgtgtcatgatctcgtgagttagtaactttcaaaactgtactttatataataagatatatgcttatatgtttcatatatatatatatatatatttattagatcgacaataacattaaactatcattactagtttacttttttaaatatgattttaataagtatcatataaatgtacaaagtgtatacaatacatgtttttatatatatatatatatatatattttttttatatataagcataaatatatagacgaacaaacaatgtagacagacctaggcacctagctatgatctatgcatacggacgaaccctattatacgtacgcatgattattgaatataccttcaaatataaacttgtgagcgtaaggttattatgttttcaatactgacgaatgacgattgtgattcatgttttgaaaaattaataaagtttaaaccatcgaatgcgtaaaccaattattcatcttttaccttaggaaaaagctggatatcattatcatatatttattaagcatattaaaccagaccaatgatttaagtcgaaaatgacagctttcaagctttgcttattggccaataaataacaaactaaaaaaagaagaaattttttaaaacgaactggtgaagtctcgtgttatcacgtgcatggagccagtcagacagagacatcatcaggtgcatgatggaccacggtagtccatttcttccctacaaccatacacgtggcctttttacatttaacagtcaaacatctggtcaacaacactctcatctgggcttccttacatcaaaccctactttttttttgtttatcaaaggcccaattgtatataagtgaaaagtttccaatgggcctttcaaggattattcccagcccaatatttctggagattaggtttatttatcatcgccaccaaagaaatttgagccgaagcttcataatcgtagtctgaggtatttttctcgatcctcaaacatttccaacacctaaaggcttattcgttacagatttctcaccaatcttcggatttattgtgctcgtacgataagcatatattagtaaatttagtggctatttaggaaatttctcgtttgatttcttgttgttgttgagatttgaatctgttgtttatggtttttgtgattacttggttttgcagagacaatgtcgacagtcggagaacttgcttgcagctacgctgttatgatccttgaagacgagggcattgccatcactgtatccttaaatctcttgacattttctgaatctcatgtcctagctattgttgtcgctatatcttgttttggttggatccttttcattatcgagacaacatggtgtgagtgtttattttaggtttatggagctctcttttgatgaaatagtcagtaccaagattcatgtttgctttggcacactcaattgttgggcatgtgttaaatgacctatctgcaaagttgttggtttagggttaggaattaggattcttttttactggatttaagaaacgtgtttgttctattagttttgatatgtaggttcaatgtttgggttaggtatccttaaccctattattgatagtctgataagattgcgactttggtcaaagcggctggtgttgagattgagtcttactggccaatgttattcgccaagatggctgagaagagaaatgtcacagaccttatcatgaatgttggtgctggtggtggtggaggcggtgccccagtgtctgctgccgcacctgctgctgctggaggagctgctgctgctgcccctgctaaggaggagaagaaggtacaaatttaaagaaacaaaaacattatattgttatatcttttagctaggtttgcttattgatactctctatgttgtttaattgtttgtaggacgaacccgcagaagagagtgatggagatcttggtttcggcttgttcgattagttgtctcctttcattttacgtttcatatgttctattgctttagttgctttgagattttaagttttgtcatttcgacactactacagtttactcttatatcatgtactggagttagcaattggctcacgaccttctttgtagttcatgagagttatcttatgctcaaaatgcattggagcttattgaatttgacttttggattcagctgcgtcttctttcctaccaaatctcagtctatttataatttgatcttgaaatagaaaagaagaacaaaaaatcaggaaagatatgaacatctgttacaacttgataattcagtggatacgcaggtttcatgaaccatggtttctcagaagttttgtaagttttttactgattatactaatgttgtcaaatgtataaaaagtaaaaattgaaccttctgcataatccagaggctttcattttttttttcttttcttcttgtgatggactcgttttagctgaaattagaacgtcggttagtaccggcggagaatgttcggagtcgagtcagtcagagagttctgataataccaaacggctactttgaagttcacggctattaagaagtcgcacatggaacttgatctcgattcgttcctcgtatcggactcagactccgattccgatttggattcttcctccgttcctcaccgtactgtcgacgaaattctcaacgcctccagttcttcatcggcttcgtcttctcctccttcctcaccaccgtcaattaaccggcggaaacaagacgatccgaatcgccgcttatcagaagcccttactaacgttgctgtattgagacctgaatctgaattgcatcgcggatttcctccgacgcggcgaaattcgacttcttcttcttcgttgagacagttgcctttgccttcactattggcaggagtaaggtcgaatgtgaagcctggtgctgcgcttgctgcggctgtggctgcttctagattggttcctacaccacacgctgctattatcaagtcaaggagagctagcagtgcaagtagtgaattgctgctgcaggtttcaaatcaagaggaagatgatcacgaagtactttcttctaatggagattctgttggagttgctgctggatccgtttctgctgatgattttcgttcttttggtggagaatctctgctggaggatgaggataatggagtttctggtgttgcaagtctagaagacgaagctaaagtaatggaagttcaagctagtgatattactgagagcttaaaccctgacttagtcactgtttcctctggttttgattctgaaggaaacgtctctacagagaaagaagcggagaccacaatggaagccggaaatgctgctattgatgacgacacagatgagacaatgttagtcgcttctttggtagagtcttcagaatctcaacatttgactgattctgaggggaagtgcgatgatgctaaggtaagcaatgatgaggaatcaagtgttggagatgttaagagtgataaatcagatataattataccggaatctaaaaaagagggaggtgatgcttttattcctgatgatggaagctcaatgtctggcatttcagagcttgtagaagagaggattgctgagttggaaaatgaaaggatgagtaaaagagagagattaaaatcgcaatcttttaggaagcagcttgtgctggctgaagagtttgagaagaaacaagcatatactggtttgcattgggaggaaggggctgctgctcagccaatgagacttgagggtgttaagatcggttccacgaatttaggttactttgatgttgatgctgacaatgtcatcagccggaccatttcatcgcaggcatttaagcgagaccatggttctcctcaggttttggctgttcatttgaattacattgcagtgggtacgtccaaaggggtcattgtcgttgtaccaagtaaatattcttctgatcatgcagatcaaatggaatcaaaggttgtcttttacatcattacttttgtccatttctaggttatttgtacacgagtttattataaccttacctgggtagatatatgctcatattattaataactatgtttacaaatctttagatgatttggcttggtttacaaggagaaaggtcccagtccccggttacctcagtttgcttcaatcagatagggagccttctgctagcaggttatggtgatggacatgttacagtttgggacatgcagagagcgtcgatagcaaaagtgatcactgaacatactgcaccagtagtatatgccttttttctaggccgggattctcagggttctcgccaatttaaagttattacaagtgatactaagggtgttgtttttaaacacagtttttcttatgctcggctgttgaacatgtatacggtggaaacgcaggtaaatttagtattctgtaagatcatatttgcttttgcttgtgattttgtgtatgtgttctactggtttcttgttcagccttactaacattgaggaatgggtttgtacaccttattttaattgcatcagtgtcttctcgatggacaaaaaaatggaacagtcctctcggcatcacctttgcctgatgaaaattttggaagctccttggtgtcttctaaggggggtaactctgcagttccatccagcagtataagtagcatgatgggaggtgttgttggggttggttcgacttggaagctctttaatgaggattcaacttcggtggaagaaggtgttgtcatatttgccacctatcaaactggactagtggtaaatattccagatatttgttcatagtcaatttactggttacgcttctggaaatgatccttttctgtttttgtcaggtaaagctcattccaaatttggaggtgtatgcacaacttcctaggccagaaggggttcgggaaggttccatgccatacactgcctggagacgctcaacaggtaattcttctcctggtataactgtgtactttacatgtactgttttacgtaggtaaaattttgcagaaaattattcgaaggaggcagaagatagggtttcttttcttgtcattgcctgggatcgtcgagttcaggttgccaagttggtaaaatcagacataaaggaatatgccaaatggtcacttgacagcccagctattggtgttgtttggctagatgaccaggtgtgtatactgatataagttttttctaagcaaatacatattcatgagttttcggcttttctctgcatattcagttgctggtgatcccaactgtgacgggccatttgtatctgttcacaagagatggtgtggtaattcaccagacaaacttttcagtggctggttcttcagggaatgacctgatttcctatcatacgtactttactaatgtctttggaaatcctgagaaagcttatcacaactctatgggtgtcagaggggcttcagtgtacattctcgggactgcacatcttgttatctccagacttttgccgtggaaggagcgggttgatgtgttaaggagaggaggtgactggatgggtgcatttaacatggcaatgtcactcttcaatggtcaagctcatggagttgttgacctccccaaaactgtggatgccataagggaagccatagcacccagtttagcagagttgctactttcctatgtagatgaagtattttcttatatttcaatagcattttccaatcagattgaaaacaatggagtaactcatgagccaagtagtggaatcaataatgtcaatttagagatagaagaacaatacaatcgtgttggtggtgttgccgttgagttctgtgttcatattaacaggatggatttgctctttgatgagatattttccagatttgttgctgtacaacaaagaggtatatttttcacatctagatgtattaccatcaacttccttttttttgtgctacattttattaaggaacaggggtcagtatcattccaactatataataattgtttaaaagatgttactacgataggatagtaactacttttctataggttgtctgattctgtatctttatttttttaaatccttagagagctttggtccaccgatcttgaaatatcttattttggtatctcctttgggttggtgtttttcttatgcatgccgatttctataatacatacacatacgtgttgtgctgtgtgtttgcatgtatgttctccattacttttagtttagttcttctgtaaatggtttagagtaattgtatagtttgctaaatgaaacagcataatactttcatatggataaattgcaatgctgagtataatattttgattccttgaggttagtaagtaagatataaacgttctttggaaactgctttccttttccacctcagtttggtactttgatctttgtttaaatctattgatgacaattaattccttgtgtctaatgagatataataatttctcttgatgactagatacatttttggagcttttggagccttatattttaagggatatgctcggatctcttcctccagaggtatcttttgtgaaattataagatttcctcaagagtgccgttgtattttattttatgatttttttgtttcatctcagatcatgcaagcgctggtagaacattatagtaggaaaggatggctacaaagaattgagcagtgtgttttgcacatggatatttcttccttggatttcaatcaggtcacgtttgtagacaatttcacgtgttctgttcggtccttttcttcaataagttgatgtgttgatttagtattatggttgaattttgatgttttcctcattgacacttaggtagtcagaatttgccgtgagcatgggctttatggggccttgctctatcttttcaacaaagggttggatgatttcaggtcacctctggaggaactcttgattgtcttacggaacagtgagaaacaaagggctacagccattgggtatgttatgttaagtcgttgtactttgttctggctgaataaaaccttacatgcaaaactgaactcgagagcctagaattcaaactgctcattcatttctacctaacatgcaactaatcctagagcgcacctatgcatatatctaattgcaatattattgttgtgtaagaaaattttgatttcctttatgacgcaatatagttgtctgaactaaggtatattttgcggccacataaatgatgagttctttttaactctgtttctttttcaggtaccggatgcttgtttatttaaagtactgctttcttggtttggcttttccaccaggtaggattctgttatggtttcactgcatgttatgatctgcaatcgaccttattgtatccagtgacctataactttatataggcattttcctctcacaaacttatttggagttttatctgcaggacatggaactctaaatcctacacgatggccatcacttaggagtgagctgattcagtttctactggagaaatcaaatgcccatgattctagtacatgtgtaacatctcgattgaattatttgaacctctaccatctgctagaaatggatactgaagccactttagatgtcctaagatatgcatttgtagaaaatgaaatggtgaagcatgagagtcaccttctggagtacggtgaagtaagtgtagagtccaagactgatggcagtttacccgaagttagcaacgatatactaatccagaatcttgtagatgctctagttcatgttcccgactggggcgtaagcaatgagtctggcgatccaattgattcaaaatcagataaaaattggccttccaaggaggatacaagtcatctatttgagtttgttgcatattatgcagcacgtggtagagtgagtatttccaagagcgtattggcacagattttagattacttaacatcagaccacattcttccaacttataacgtgtcttctaagatgagagagaaccaattactaaaccttctgaaagctgtcccggagactgattgggatgcagattatgtatcacagctttgtgagaaagcacatttttatcaggtatcctcttggtagccattcatcattcccctatagcgtgcttgcaatgctttattttgggatgttgtccttgatctctgttaatggtttccaaattccccaggtttgtggctatattcatattatcgatcgaaggtacgttgcagctttggatagctacgtgaaagaggcagatgaacccatacatttgttttgctatgtgaacaagatgctgtcacagttgagtggagatgaattcactgcctttcaatctgcaataatttctaggattcccgagctccttgatttgagcaggtaactttaggttgattttactctctctctctctgttgagtaggtctagtggactaataatattggatgtctggcattttgcagacaaggagcattcttcctgattatttgtaatttgaaagacaccattaaacgcattcaagagcagctccattctcatccaagaagcttgttcctgtatctcaagactgttattgaggtttacttgtctgggagtcttgatttttctcgtctaagaaaacatgaagctgtagatagctcgggtgaaaacattagaagggatatacccaaagaggcgaagatttatttggaaggactcaatgactttcccaaattcatccaagataatccagtcaatgtgactgatgacatgattgagctttacgtggaggtaaaaaactacacttgtgaagactcgttcaattaaatttctctctgcagtctttcttatatttttaagtcaaatgcatttcttatcttttctttgtcaaatggctgctctctaatagaaataagttctcctggcagctctgaaaacaatattttggtttttgtgactgcagaagtcagtgagacacttttagtccgcaataggtcttagatctctgtcaaagtatatgttccctcttcatcgccatcttgcaaatgttatagctctttccaactatctttcagaatttgcaagattgaaaccccattgtttttattacaacagatatttttttggtttatttgtttggaaaagtgatagtgcttgctagctcggcttgttcttaattgcttctttttatcctttttagtgggcccttatgaatatttggcatcattgaatcacttcaatactgatgattctctgtgtattttaacagctattatgcaagtacgaaccgaagtccgtcttgaaatttctggaaacctttgacagctacagggtggaacactgtcttcgcctctgccaggaatatggaattgtcgatgcagcagcatttctcttggaaagggtgggtgatgcaggaagtgctttgtcacttacactctctggactcaatgaaaaatatgtcgagcttgaaattgcagtggaatgcctaatgtcagaaatgaaattgggtgctagcgaaggagccagcttggaacacttcagtagtgccttagagttgaaagaggtccgtacatatttatgacaataagaaaatgtgctctacatggctctctctcatgctgtttgtgatccttcaggtacatgacatacaaggtgttttgcaagcctgtataggattgtgtcagcgcaacactcctcgtcttaatccggaggagtcagagatactctggtttcgcttccttgacacgtaagcctgatcatacacctgatcgctacttaccgatttcttatcatccttataacacactcatcatagttactcttaaacatatgcaattaatatcatgttggaataaacaagcctgagcgagcgctcggagctattaaggcaatgatgatcatagttgtctattcgtgctttatgcagtttctgtgaacctttgatggaatcataccgggaaccgaagaacaccgatggaataaacaaaggttctttaggtgttaaatcattggaacgtcatgtcaatgaatcagatgttgcaattaagtggaggattccaagatctgatacggcagcgacacacatcctgagaaagctcatatctcaatttatcaaagagattgttgaaggaatgataggatatgttcgtcttccaacaatcatgacaaaactcctttctgacaatggtactcaagagtttggtgattttaaacttacaatactgggaatgcttggaacatatggcttcgaacggagaatactagtatgttcctgcgtggctgcttctctctaatcatgtacttttgtgcatcggttgactgatctctcttcaaatgttctaaaacctttttttcccctggacaggatactgcaaagtctttaatcgaagatgatacattctactccatgaacttacttaagaaaggtgcttctcacgggtatgcacccagaagtttgctttgttgtatatgcagttgccctctcaccaagacattttctgctcttcgtgtacgtgttttcaactgtggccacgcaacacatcttcaatgtgaaccttcagagaatgagacgtcaacatcggcgtcatcaattcatgtctcctcatcaggctgtcctgtctgtatgaccaagaagaccagcaaaagctctttaaaaggtaaatcgttctaccgagattatggactgataagcacagtttcgtcaaacgccgggtcttcacaacgtgcttcgccttactcacacgagaatgaaatgagcgatcattctcataaccaacaactttcacgggtaagatgtttataattctaaaactgaaaacctctttgcaattaactaaaaaaaaatacactgttcaacgttgcagtttgaaatcttaaccaaccttcagaaagatcagagattggtacagatagagagcttgcctcgattaaggcttgcacctccggctgtgtaccatgaaaaagtgagcaggctctcgggttttaccccgggagagagtagcggtaaagacacaaaacctgtaaaaaccggacagggtaagaagccgaaaacaaaaggatcgatatttgggtcaacatttggtaaatcttttctttaataggccaagagttggtaattgggattatgattaggaccctaagaccatctccaatgtaaagatgtctcaacgagtttagaaccatcaacaattaatgttgtatatactatatatacacaaatatactactatttattcatcaacaaccagtttgagttcccatggtaaagctttagtttacaatattgactactatttagataattaactaaatgctgaaccagaatgtatccgccagcacctactaagcgttccgtcagcaccaccacttgtgctctgtactctgaaaggtgaaaaaagattggtcgagattattatatggtttgtaactaggaaaattagtaactttattaacttgatgtatagtaccaaaagtaataaaactagttatataaccaatgttcaaaaagttcactaatatagttggtcccctcaagacaagattctttgatttgatgccgtcaagaatcttatattatatagctagtctttgatgtattctcagcataaattattcaatcaatttgggataagattcctgataaacataaagtgtgtgaatcagatctcaaggtccaacatggaattagaataaaggtcttttttctttaatctgatgcttgcttgacaaggaattgtttgttttttcttcttcttatctttttgatccatcgaagagatcatgtgacgacaatttcatcctcttacttttatagcttggatttgttgattttcatctgcagtttttaccctcaagacagatttgtttaaaaactaattgcaagtctgactttgatgacaaaagtgaaacttggaagcaaactgtattatttatacgaacgacaaaaaagagaaatctgactttggctaagactaggtcaatgtagttccacctccaagtctcagtaggtacattctccaacattttattcaatacattataacatttcttgttatttttagctcacaataagacttattacagcctagaagctaacagtaataagtggtagaaacgacttcaaactcaactcccacataaagcttatcctttaccaaataaggttcatttagtttccccagaggcatgaaatccgcaaagccactttggtccgaaggttctgcatcaaaccagctcaaacctacaaaaataaaagattactactagtattttaccatcacaagactaaatttccaaaacaaattcctcctaataaagatggatcctatatatatacctgattcctcaacatgattccagctaacttgatccaatacccgcagcttgaacttggcgtaagtttttgtcattggtgcattgttgacaaacccttctgctgatagatacacagaaaatgatttgtctttttcatccatataccctcttggatgaacttcaagtctcctatatattgtgatgcattttcattagtatattgttgtgtctttttaaagaagtcgttggaatcaatatatatttaccatttcctggttccaacgacaaattcattagactgatgagcctttccagggttgaaggacgagaacttgctcatcatccaagtgactttgtggttaagaggcttctctattaagctaaaacactctgctgttccgggattagcaggttcaatcccatgaaacttgacaccaaacatacaacaatctccaataaggaaaccttttctctcaagatcagcaagagatatgaaccttaaaaacccctcactagctggttctggatttatatcaaactcatctcgtcctgctcatataacaacacatcaacatcaaacacacagatatatatgattcaaggagagtgagagagaaagagaaagagagaaaccatgggtgtgccattttcgctctagttgactgacgactaggagctcatatgtaggcatatcatttaccggaacttgattcactaagaacatggagacatgagtccccttagcattcttatgcccatttgggtacacagagagtttcctgttaccataacaagccaagagaacgatatattgaggttaatgatcatctactgtttctttgttttcttttgtatgtcaataagaagatcaaaaagcttcacaccatttgtgaccagcgagatcgaaaacagaggattcgaccttttcgattccatgctttttgagtaaagagaagttgtctatcttgaacaagtgagatgttgtgtgacgtattttgaacagcctcaccatttctgtgaggaagagaaaattattataagaacttgtataaagactaaagagataagacacaaaattatgtttattatttaaccttcaatggggattggtcgcgacattgtaagaagctacaaatgatatcttcttaagtggaggagacttatacaaatcttttttgaagatgtaagtctatttatagacagacaagagtttatctatttattcattgggatcccatgtttttgttgatgtctctgttttggctccaacatttatcgaatcgaacaaaaacttcaaacgtggattacacgctacagtaacagagagattcgagattgataagcatttatatacatcacaagttttgggtatatattcacgttcgtaacatcgaactaaattctaaactcatctcaaaccaaagtagaaagggaaatctactttaacattttttctttaaacttgacccggagacccaaaacccgtctaacttcagagctggtgtgagtcttcaagtcatatgggtcctgaggtctctccccaaaagttaagtatcttatctactaatctctcactgttctctgagtcattccggaggaaattcgtatctactatacatttagtaccgaattgatgtatattcagtattggatagttaaacttgttccttaagaaaaaaagaaatcgagttcatggactgagatttgcaaacgaggtcttatcatatcttcttgtaaaatacccgggttctgttctcaaataatttcaggtatcaggtattacatgaaccgaaattgatatccgtgagtattttttattacccgaacatatatatacatatgaggacatatatactgataacttgagtttgtgaattgtttaatgattggattatggaacaagttaaaaacaaggtttatttcttgttttttattattgtaataaaggaaaacttgttataattttatggatagttttatatatgtttgggtatatctggacaaggttttggtaaataatattgaaacccaaaataattttggttatttattgggttcttcaacctatacccgaagagaacctatagcttaaataatacgtataatcgaaccagtcttaaacttctaaaccgaacccgaaagactcgatccaaacccgacccgaatacccaaatttcctcaccttagactaaaacaaatggactcctcccttatcaaaagaaaaagaaaaacaattgggctccttgactctaaaaaacacaatgggcttcgtgagataatataatgagtccattagtcatctataaattcagtgactagcgaaaaacatgagaaacatatcggaagcttcttcaccaacctggaaagagaccaccggtaacgtctccaacttatttccctcttctttccatttttttttcaatttacttcttcttcttcttctccagtttcttctatcggtttatttttcaattccatcttcattgtttcgcagacccatagataggctttgatttagggattttaatttcaatggctgcgatcgcgaatccacgcttgctgcttaattattcctgcgaatgacattttcttaagtttaacctttttattttctgttatgttgtttgctcgtttcgaatgaggtcactttttaactcgttcatggatttagcttctaaaaattgatctttttttgcagaaatatgaattaggcatatatatatatatggttttagaggtcaatatacattgtattattcgtttgcttcattcttacaaaagtagagctaaaaaaacctgagcttttaagtcaaagccttattcaaaaatgtttttgctttctaatttctaaagcttaagcattgatgttactgttttgtgatgttcaggtggactggaatcagttttggtagagagcgttgttaaagtttcgtccattaacaggctgaagagttcttcctcaatctgtgtaaccaccacttcgtgctcctcctctatctgtttctcattccagtctcgtctttcgatttctctagcacatgcttgtctcctctgctcacttgttccgcgttcaagctctgattctctctttccctgcaaccatccttttgcctcgcataccaattggttctcaaagtgttgagtttcgtggaatgagtttgtcctttgcatcaattcatctctgaaatagtccattatcagatgttcttcgtggatccaaatggcgtgtctttctttgactcggttccatagctgtgctgccttctcttcaacctcatcattgtattcatcttcactctctctatcaacagtatcacaattctcatcatcatcatacttggtatctgtctcttgtcctccttccatgcaagatgcttcatccattgagccccattcatccaaattgaaaggactaatgttggccaaagactcaaaccgctgaatcgtttgcatgagcttttgtttggttcctgcaaaatcatttacataacgtatgtttcagaacttcgaagtctgaaaaaatctaagaagagaacttgcttcgattgcaatgaaggaaatctatactcactttccacattgtcaaggcattgactgaaagaagagtctgatgtttcgtcatattcctcatgttgaatctcaaacactgagacagggctgttgtgctccttttcacactgtaagttctcctgaccatgatcattacatattaggccaaccaaatcatccaactagtaaagtgcatagggtaataatttcagtatgttaaatgttactcttataagactcattcattaagttgttagattcgtagtcataaaggaattaaagggtacatgctattatatgtaccaaggacaaagacagcttctgttttgtcttcatgtgaatttatattaacaaacagctgcacgtgcatttagagacagcatgggcgaccttacggttgaagcaaagtcaacccataagatctctattctcagatcacattgtcactttatttctttcttaattttgatttgattctgttttctctttatttatgcatgtagtagtcaaagtatgtgattaattaatgttataagtacgagtttctatttctcttaatatagtattcttacctcaggtcccacttcagtgtcggctagtattactgctgtgcaagaatcttcgccgacgcagtgtaagttgtttttaacactctgtttttcaccgcactcctcaacgttacttccccatgatgatggtaaaaactccgatgtaaaatccaagtcagaccaactgctgcaggatgtgccgctggtggtggaggatcctgtggttgttgtcgtgttcttggttgtgtactgatgaggttcaaaatgtgatatgtcctcatgcaggtccttagacgagtgccatcgcacgatgtctttgactcgaataacggtgatgcttgcttggttttctgctttgttcttggttgctaaccgccgagaaaggctccttggtaagatccccgatggagcggatttgatggtgttggaatggaggttcttgatggcgttaatcacagcctgcaatgcattggattgtttcctctttggtatcattgggaaagggttgagaggatgccgtctgggaatcgatttgaacccgtttgaggaacatgagttggaatcttccaagagacagtctttgagcattctcgaccttagctccatcctgaaacactctttggctcaggtacgaagctgaacttgaaaaacactgaactgacgataagaaagtgtcttaacaaaaagaaaatatcttgaaagacgggagtgggctagtgaaatgcttaggagtgttaagatgtatttatgtgtggctgatgtgagtttatggaaagagagaggcagcttcttgatgaagatctcaagatgatgacaggcttagagaaagaaaggaactgagttttttgcttaatatataattaagttagttggtagagaataagacaaaatatgtgggacctaggatgtttcgctctacgtgtagcaagatttggagcttctgcttatgtgcttgttagtttataattttataattgaaactcaaaaaggtttgttggagctatgctatactcagttcttgtgtctagtcacaagatccagagacctggcgatgctattaaagtcggtactgctaataaatggtttttacttttttcaaaaattatctcaattggtaaaaaatgaggtctcgttttctttgtttttgttgataaacctaaaaagcttttgtgttacgtattgagcagatgaccgaaagttgtctgtgtagccttttgtcttaccttcttatttacactgcatgttgactgttgagtaattctgatttttggttgtgttctcagctaaacggtgaaagccatgtgaatgttcctatcacttctgacagtatacctcctctatggggctaattgtgtgatcaaggctacgttgctgtttgtctgcaagttcccatcaccgaaacccaaaaggttcatccagatgcttgtgtttatgcgattttctatttgactgcaattgtttctccgtaacaactttatatcgtgaaagacatccataaatgtgctgagatgcttcgtgcagactacaggacatgggcataggattttgtggtaatcatggtcagccagcagaatcatgtgtagaacaagatgggctgattgaagagaatgaatcttaggttcatgatcatgatgactatgttgacagcttgtgaatgagatgaatgcataggacttagtctgccttttgaggtgaagctgagcaatcactgtgcaaaggtaatgatttttagtccttctttttgccttttggccctgtctgtaactctacttttgcctctttgtttattgtttttgctatagatgtgctataagtgtgaacataaatccttaaacagcatcaacatgtatacactcatatccagcccatttccgcaaagacatatcttcagcataactattcactgggaacacacactgcgctgcaaaatctttgatgtgtcaaaatagctagctttcagaatgaactcacgacactgatgacatgagcccattctgaaagctaataatgcttgactcatcgccatagttatgctctctgcgtattgctactgtcagcaaatgcgagaactaaaaagaaaaaatgtcgcaagcttgaaattgtgttgcacgatctcttcatctttgcattcaatttctggtttcttaagagttctttgcacaatttatactcggagttgtcttcatagctttgtttactaataaatttctgctattttttggttaaacgaactgtgagtgtgaagtgtctcgtttgattaaagttcttactaagcatacataagcaagatatatttgtttgactgatagattttcagtctgtccaatcctgcatgaactgaatatcatatacattggtatattgcatctttgaccaataaaagaactggcgactgctctgcatcgatgggatgaacacatttataagtacttgtcatttcagtggctatctctatgtatggtagttgtttaaatgatttaatgattttgactagaatctgttgcaacgcagcgtgtggtgaaacgtggaggctcgttgttgcatgaagtgtatccaggtccagatttacttctttatacatttgcgaattcctttttccaattagattgcctttcccctcattcttcttcttttggcttgtaaaagtcgctttgcgtgtatttatgcgattaagtctctcgtcttcggtacttctacgaggcttctgactataagcattaattttattgtcaatcacgaagagaattttcgtatggaaaatactgaagaaacagagagattctcaaatgatatttgtgttttgctattagacagcgatgcgacatgtctggcgaatctgtcagagatgatacgcaaatgcggatataaaggtatatcatcgtcacccagtgtttgaatttatgtttttgataaaactatcttcacattttgttgttatcgctgagcacctctactggtttgttgtcctggaatgtttaattctatctcacagttgtggctactacaagagctgatgatttgccgcttatcatcaataacaaagataaaaagattgatcttgtactggcagagttccgcttgattgagatgaacaagtatgaacttcttgagaaaatcaggtcgatttgtgagattccggttgttggtaagcaaaacaggcctctaatccatattcttgtcgataatgttttcatgtccagtctgacaagttaaattaatccttgattctggacccttgatcttttcatgacaagtctgactgtctgagagatgcttgcttttaatcattgctcttctctgtatgataacagtttcgggtgcacatgtcaaagatgccattgtagaatgtctgtgcagaggtgccaaattgtgtctggagaagccgctcatggagaatgacttcaaaattctgtggcagtttacagtcagtagacagcgaaactttcgtagtcaaattgacatcaacccacctgagaaaaatcattcaatcacccacactcaatctcttggagctgagcttaagaaaaataacaataacagcgaagttgaaacagaagatcttgataagtacaaaggtgagaattttcagaaatgcagaacgaatttagagaaacaaatgaggaacatctccatttcatctcctcatgcgtttttgtttgctgttgaggttttactaaaaatttcttttgtgcagatgaactcggacaaggtaacaaaagaaaggaaagagcggatacagatactggagaacatacagagaagaataatggctctgatttgggagaccaaaagaagccaaaacttctttttgcagatgacctacaaaacgaaactttagaagctgtcccaaatataggtgagattcactgatcgatctcctttttttttgtcacttatatccaccaatttgcaaactcttatggtttattcagaagaagccaacaatgaaagaaaggcaccaacagagataaagaagaatggagaaagtagtgagaagaagagcccagaactggtttgtatggaggaggaacttcaaaagtggtcagctgaatcatttattgatttaactgcttctggtgagcctctcagatctcaaataatattggattgattgcaatatttttgaatttagatacatacatatatgcaaatgttttaggttacataagattccagttctgctttgtcataggtgatctttgagttatggtatcaattatgggaaacatgttgtttctaatcccattcttggtctattatggtattgtacttgatgaaataaccaaatttggtcttggacagtggaaaatgaatcccaagacccactggagagcgttggggattctgtgggacctcatgagattccattgagtccgccagagtcctcaaacaataatgttgctgctcagctacaaatgccgacacatgaagcattagatgaagaagtgatgcaggatggactcagcctctctgacctcgaagttgatctgcaggagggacatggctcaaataaggagcttttcgataagatattcaccgatctcgccaaagagcttaaaccttaaattacaaagctctgctctgcattgctctatctgtctccttaattatgagtataagatgtttgtctttggttttaagtttgtctttctctcgttagtgtttgaacttgaacttccgtttttttttttcagtgttgtcttttttatgtctcgagtcaaattggctttgttagtttcttactttcttgaaaatttccaataaaccatctttgttagttgttgcccttgttcgaaagactgctttgattctctggaatcaccgacagataagagagagcccaaaatggctgttaactttctgttaaggtctgtaacacacacaatgtttaacaacgatggctggagtacaagcttttaaaaacgctcacaaaagatgacaaaaaacacctaaagattctttaaaattaaaaccaaaaagaagaaataactgggaatagtagtaattcagtgactaaggctcagcctcatcttctgattcagcatactcgtcgtctgactcatcaggccaaacatagtcgacaacatcgagaggatgcctgtgcaacaaattcaagagctgttcaaggtttctcagctgactttggcccgcctctgcatccatgtcctgcccggcctctgcatccatctcctccatttttttcggatcattgtaactcaacaccttcaatccaaactttccattgtcatccacattctcaactcgaaatgattttgctagagatcttccctccactttgacatgtgacacgctgcaaaaaaaatcagcaaaaactccattcacattgcagaagttgagaagtttttaaggaaaatctagagcagtagggagagaagatggtaccatatatagtattggccatccatttcttgtgtctgaactcgacctagaaactcgactagcagatacccaccaatgcaaagaacaggttctggaagctgaaagctctgcaatcgattttcctactcaaagaaaccatcatttgttatcaacagttcaggaacaagttttctgttatgctaaagaagaagacaatgatttgtaacacacctgagccatcgaaaactcttgtgaagtgtaagtccatacatagttgctttcaattgaactctttcctggctcaccttttttatcctgtgaattgttgtagtgaggtgaattgtccttttcgtgacccaaccggaaacgaacataatgtgaagagtatatcggatgaccgcgctgaaaataagctacagaaaatggaaaactgtaagcaataaaactcagttaaagacgcaaaaaaaaacaaaaaaattaacacaaggatcgcattggtaccttggaaaggatggatgctgacttcagtaatgagacacaaatcaccaatcaacttgtaaagaagtgattcgggcaccgtagttttgtgttgcccagtactcgaccaataagaaggggttcgaccaatccgatctctcttctcgagtgtgtttaagatgctttctactgggtaattatcagtactggaagctctaatggcatcagctatacagctttcaataggtgaagacatgcaccctctagccaacaaggcaaaagcccggtgctctttttcaagtagccttgtatccatgagactgcttgacccagcttcagatgactctccatttctatcattacttgtttcaattatatgatccacattagatagctgatggaacaacttcaagcatagattcttggagagactatacttaaccactgcaaatgcaaacccaccatactcaagattcaacagaaacattgaagatagataaaataactaacattgaagaggattctgatgagattaccaaattgtcgccaggagcgtgagacagcactggcacggacaatatctgatggatcatctagacaagagagaattgatagcgacgtgtcggtatcaagattgttcacgaaatccatcttgttcgataaaactcaattctcaccctacaaaagattgaaactttcaaaatcaacaacgaaaattacacaatacttttcgatttcttgagcatttggcacaaaaggaacagaaattccgatgaataagcaacaagcggtggaatcagaggtataaacggttcagatttggaggaagagactcaaatatatatgtatcgaaagggaatatttcagagaaaacgggaacagagagaaataatatacctaatgtcttcttatcgagaatgagatagagcgatggtgaccctaggaattgaattgaattgaattgaattgaatcggcgattacgacgtttatttacttgagcaaccgtctttctttttttttggttgtggctaaagcgaaaatatcattaacacaaaactatttaataaaatatataattatgaataactaaataaaacccagctaaataatcaagtgtaaaatataaatttaattttttatcgttaatatttaaaatttaaatagtaaatagttatccatacatttttaatatataattaataattttgtattaaataaattttaatcatacacatttgattttattatacattttaattatctatttcaacataataaactacattttaattctatacgttccaccttataatttataaggaaattatatgtatatatcttatatgataaaaattaaaaaattaggtttgtatagaaaacataaagtaataatgagtcttggaaagagaaataaaataaagataatgtttaattcttattgggagttgaaaatgtgattttaactcatagttttctccataataatgatttcaaaagacttttaatattcattttcggtgcttttttgtcaattaataaaagattattataaaatgtctgcctatataggcgggtataagatataaattcaatttttatcaataatatttaaaatttgaatagtaaatagtaatccacacatttttttaatacttaattcagtaatttttgtattaaacaaaattttaatcatacacatttgattttactatacattttaactatctattccaacataataaactatattttaattttatacgctataccttaaaattgatatttgaattttaaataataacttatacacttttcaatatttaatttaatactttcttaaaacaaattttaattttacaaatttgattttgcgatacaatttaaatataaactttatcataatacaaatattatttaattcgactctattttctccggtgaactttcccattagagcgatctcaaaaccttattcaaaccctgcaagttcgacttcggcaatgatatagtgctcattgtatgttttggtatagacactgctagcactaatttcgttagtgtcaatctccttgcaaaaattaggcacctgtctttccaccctgctaaccttgatgacacactttctaagatctcctcgaaaatctctttatttgttctcttttagagaaatgggcatcccaagattctttccaagttcctttgtcgacttgatcccgctcttgtcactgatcatcactaattcccgtgacacattctcagcaaaaaagattttggatttcttcaacctcactttttggcctgatgctacacaatatctctccaatattcgtcttataatctaaatttggccactgatccttccgtaaatagatcaagtcatccgcaaagcaaatatgagacaactttgttcctctatgtaatattatctcttcttatttctatcatagaaatataaagcattagctctacgttgcggctacaaactctagtctcatgtcactctcttcaaagcttcttcaaaaaaatttattatataaaaacaaactgaaattccttttgataatttttaaaatttacagttattggttttcgttttatttacttatgcatgaataaatttatcaaacacatgaactaaaccaaaatagaggtggtatgagaaaagaacaggactaaaagaactttgttcctcgaaaaaaagtttgaatttctttattatgtaagtatttttttttatcttagaaattcatcaaaatatcttcctcttttattttgaacatgatacacacaaatgtaagaacccaaagaagccaaaacatcattaaattaaacaaaacaaaaaacaaaaacaaaagaacctacaaagagacttggacatcttttaatcccaaaccagacctaatcatacaatcattcatgatttaacttgcgatatacaaagctccatctccaacacttcaccacgtaataaactattaggaacaaacatgacatttttatctttaggggtttcaaaactcacttcaagaattctcttcatctccggcgattcgtgacaacaagtgcgtccatcaaacgagtaagagattcgatatgagaacttctccacttcaggagccaatggtgcaatacaatttacagccacataaacaccgtttggctctctaaaacattgcacaacgaacaataaagtctttgtaagcgttataagaaccaaagacttatcgtttatcgccattcgcacatccctcggttcaccaaaggtgaaaaaacaatcgggttttaaagggtgggatatgatctctttgtataagccagtgtatttgcattctttgatttcagggcaagaacatagagagaaactgcaatattccttctcatgacttgagtctctcccataaggaacattcttagtgcaacctaactttgcgtttcggcatgggacgatgactgatttgagaacactctccattgctttgcaacgtttgtttccaatgggtaaagcacatgcaggacatttctttccgagtttgagccagcaaaaaccgcaagctacatgtccattatcacactgaagtacaaaaccaaagagttgcaatcaaattcatatcaaagcctattaaataaaagcaaagattttcaatttttgaatcgaaggtaaaaataaccaactcaaaattgtcgtcacagtaaatatcaaccaactcttaatttgcgctatatatataaactagcaatcatattaaaagataatgaaaaaatcaaggcactcaaaatatatgtaatctgtataaaactgaaaatgagatgctactgcatgtaaaagctaaagcaagcttacaaaatcaggatcgatcttatactaaatgactataaaaggaaactctatgaagtcaattagcaatgtaaataatcaaaacgtaacctgaaataaaggaatagtgagtggctcgtagcaaataggacaatcaagaacatcaagatctagcaacgtccccgttaccgaacattttcgttgcctcttttgtgatcaagtctttctcgaaccatctccatcttctaaagaacacttcatgtctcagaaaaaagtatgagaggcttgagaatagtagggaaacgaattaggtttttttttttttttttttaaagtaatgttaaattagatttaaaagaaaattgcgtttttacaacgagtgcaacttataatttatacgagagagattgaaaacaggaagtagaaagagtaagctt

SEQ ID NO: 506 - DNA, 22145 bp, Arabidopsis thaliana
aaggtaagtgggcttgagatcacttatttcttgtggatctactgagatgaaatgtctccttcaatatgattttttttttttttttgtgaatctcagcctccaagtgaaaaagatacagatgtcaagcttaagcagctgcagtatctgttagtcaaagttctcccagttcttaaggatatttatacggagcagaaccgtgaactagagattgaatcaacaattagaggtaaggctctttgtcttcacttgtgctatcctcttatttcttcctctttctattctccactcacgaaccttttttattctaggacaccctgtgacagaagctaatatcaagaggtgcaaacttgacccaagcgaacgcatatactggtaagattccaaatctctgggagcatctttttggctgatcttttatcttgggggaaaaccaatgttattgaattttcatactgttttttgtatcctttgcaaataggcagagagcaaattaaaatgtaccgattgtcaccagtttcgtgaggagatttggtagcaaactaattgttaaatgaatggaatataaaaggaatgatttggggggagtaatcagggtggtttgatgggtagatgactgaagagattatgatcttattaagtatcttcatttttattgtattgtcatttgatttaaaggacattgtcattgttattttcataactgtcttttaacgttattcctttttcatgtattttcatttgaacgaaaataagcttcatatcatgttaagcaatgggcagagagttgttttcatcattatgagtgtcatatgcccaaggaagacaagggttctataccttgttgggctacttttggttatctttgggatttggtatatggggtctactgttcattagttctctttatatccaaaacaagtgaagacgttgcatattggataaaacaggacatagtttcgttatccatctatagaaacacatttgtcaatctgtttctttgaattgtatctcgtatttgatttaacgtatttttctaaatgtttccttgtttgttgacaatctcttcatccctatacgacagtgatctctgccgcacatccattgccaattttcacagaagctgtccgaacaaaaattgttcagtcgatatatgtctttcttgctgcaaggaactaagtgagggcttccatcaagagagagatgggaagaaaaatgcagaagggaaaggatatgaatgtcgaatcccagcaggtcaaggaaaagactcggacgcatatgttccactgcatttctcgacttggaagcttaactcagacagtagcattccatgccctccaaaagagtgtggtggttgtggtacttcaacactggagttgagacgcttatggaaaagagattgggttgaaaaattaataacgaatgccgagaaatgtactctgaattttaggccaacagatgtggatattgttcatgaatgttcctcatgctctaccaattctgattccattagaaggcaggcagcttttaggaagaatgctcatgataatttcttatactccccaaatgctgttgatctggctgaagacgatattgctcattttcagtttcattggatgaaggcagaacctgtgatagtcagaaatgttctcgagaagacatctggactaagttgggaaccaatggttatgtggagggcttgtagggaaatggatccaaagcgtaaaggtacagaagaagagacaacaaaagtgaaagctttggattgcttggactggtgtgaggtcagtcaacccgattctgtattttaatacttgatacactgtaaatgttttctaagaagtatatacatgaccatcctttcgcgtgtaggttgaaataaatctgcatcagttttttgagggctacttagaaggccgcatgcataaaaacggttggccagaaatgttgaaattgaaggactggcctccctcagatttatttgaaaagcgccttccaaggcataatgctgagtttattgccgcattgcctttctttgattacactgacccaaagtctggtatcctaaatctcgcaacaagatttccggaaggatccttgaagccagatcttggacccaagacatacattgcgtacggtttccatgaagagcttaatagaggagattcggtgacaaaacttcattgtgacatttctgacgcggtacgtgcaccaattattttcgtactttttttaattattcagagacataaaccatggatttttactttctgaggtgttttaaagctgaaactaggctgtccaatctatcccttatacttcggagattaattgttctatataattgtgggttaggtcaatgtgttgacacacacagctaaagtggaaatccctcccgtcaaataccaaaacataaaagtacatcagaaaaaatatgcagaagccatgttgcagaaacaacaatacagtggtcaagtgaaagaagccagcgaacttgaaaacaagtcaatgaaagaagtggatgaaagtaaaaaggatttaaaagacaaggcagctaacgaagaacaatcaaataacagttcaagaccgtcgggctcaggagaagctgagaaagtaattatttcaaaaggtattgcgagaataagagagctttcccattcttatgtatacaaacatatgttactgaatatggagaatggactaatgatgccaacacttcttgcaactcccccatgcgatacagaggataatcccacacaacctgctgtgagtacaagtgtggaatccatacaagaacagaagctggatgctccaaaagaaactgatggcaataccaatgagaggtcaaaggctgtgcatggtggtgctgtctgggatatctttcgaagagaggatgttccaaaacttattcagtttttgaaaaggcacgagcatgagtttcgtcacttcaataacgaacccctggaatccgtaagtgtcgtctcatacatctcttgtaaatgattaatattgaattagtcactaatgtgtgaaaaatcaaaaatttggtgcactgtttaatttcaggttattcacccaattcatgaccagactatgttcttgagtgatagccagaagaaacagctgaaagaagaatttggtaagattctggtttatgcttaaaacatgtgccgcttaaccagactatgttcttgattcatctttgctacgaaaacggtgaatatatgtatttcttcaaatgcagatatagaaccatggacctttgagcaacacctcggcgaagcagtcttcatacctgcaggttgtcctcaccaagtgaggaatagacaggtaagcaattagttaaaattccctattttcgacatcttttttcattcatctacattttgctcattcattgttattctttcctcaaaaaagcaaaaaactcaacattttatgttagtgttccctaaaattcagactgtttccagtcttgcataaaggtggcactagactttgtggctcctgaaagcgtcgaagaatgccttaggctaacacaggagttccggagattgcctaaagaccacagttctagcgaggataaattggaggtacactatcaatcataatattctgaatcatattggaacttactcgttttgaatcataatattctagtttcagcttgagctcttatcacttctcttctccctgcattgcagcttaagaaaattgcactgtatgctgcgagttcagccataagagaggtaaaagggctaatgcaaagctcccgacgcagtgatacctaacaaatgacaaggtttgttcttcaaattgacatctatctccacattgtatgacttgttatgtactcaaagaataaatctaattaaccctcttttctgattcattacaggaaaagttcccaagtttattttatccctaaactattcctacgcagttgacttgttgtaacttcctctactttaaaatagtagagttggatagagtgtaatgtataattaccatgattaccgagtagtagaattatgtaaaagaatctgttaacttcaagttttaatcaacatgttgcttaacaatgactctggttccgaaaatttcaagcttttgacaacaataagcaagagacctacctgtgccctcttgggagttgggaagatgattgttgttgtcttcaatcagagaatctctgtcagtcgtagactcactctgtttagtctaaagtaaactcatctctaatcaaaggattttgttcatgaacgtggacagaattgtgcactatatacaatgggaaagaaaaaagagaagaatcattgcgaaagcgataatgttggtggattagtgaaaaatacagctgatattacacattgtgcgttgtattatcgtactacaagcaaaaaacttcaaaagggatatttttggagttggatgttgtctgtcatttcttggccagtaatttctttgggagcttatcgagtggcgttgatttaagtaaaaatagcctcgcagctcgctctcgcaatgtccctccgcacttcagaccacgtgactgaagctcagtcttcaatctctccatccccaaaacctgaaaccaaacaaccgatgggttcaatatatgttaagtactgtgattgatgtaatacatgaactatatgacacaccgttgtacaaagcaattaaagtttctgatattttctgttcaaagacaccaatttggtttttaacttgcgtataaaaaattccatacgtacctccatgtctgctggtgaattgaagtcatcaaagttaagtggttcaacaggtttgcaacatactgcatcaacagacactgtttctttcgcagttccttctctcttaacagctgcagacgtaattaacgtttcacaagctacatcaaccagattcttccctgcgtctccacttgatttctccaccttttcaagttgatccatttcatcagcaacagtattagcatcatcaacagcaacagaaacaggtaaatcattcatctcctcttcaataatcccttgaacaccggtgatctcttccttaaccacatcgaaactgcggtgcattacagcgtcgttctcttcctctgaaccactattgcatgaagatttaccagatgaatcaccatcatgaccaccattgtttagaacaacagatttctcatcttcctcgtcgtcgctatcatcactgtcactatcttcaacagctctcttccccttcctataaaaaccaacacatcatcaacgacaagaaacatacatatgaagaactcaagtaacaaaattagcatcacaatttcagaaaaaaataacaactttaacaatcaatcaagtaaagagaattcataccatattttgagacgcttcttcttctcagattcagcaccaatcttcgcttttctcttcccattcttgaaagattcattcaaagccaaatcaacagccaaaatacacttatcagattcttccttatacttattaacatacttctgcgtagctccatttccaacaccttgtttcactttattggattgcttcttcagatactcaagagcctttttctcaaggttcctcccttcttcaccatccttccactcctgaagcctattctctgcgtttacatgcctcaatctccgtccactcatatccctacaagcatcgaagttgttcgtcttcttctgcccagctttcatacccccaccacgaagtaacgatccgaatcctcctttacctccacggagtgaaaggacaagattcacggtggcgtcaggctgagaaatcgcggatccatcggagatttggtatcctccgcttatcaatctctgtagatgcgtcgggatcttcgtttgctcgaagatccgctgcttgatctgctcgccataagctaacggagaggagaaacttagggttaatgattttccgtcgagtagtctcacgaaaaactgcaacggcttagaactctgatccgccatcgattttcgattcaaaagcttggacgaagaagaagaagttcgatttctagagaggaatcagagagaaattggggaaatttgacggagccctaataataagtctctctctctctcgctgcttgttgggctaagattattatcttatccacacttttgggtttatgactgggctttatattgtctgaatctatgtcggtcaggagaaatcgattttttttgtacaatttgaccaaactaatatctatatatgatatggtaaatgatgtattattaagtaaaaattatctacaattgaatcttataataaatatatatatatggaaaaattactcttagataaaataacatgataaattgtatgttattggttaaacatgttatttgtttttttttggtcaaaacacacacatgaaaaaacaatttttaaataaatttgttatatttactccaaagcttttaaaactaaaaaaaaaattaaggttacctaaagttatcaaattcatatatataaccatgttttatttttataaaggtatcttcaatagtgatctctatattttcctttatttatagatatgactctattttagaggctgctccaatggtcacatgtaaaatagaattttctttaaaatagaggagatatcatctctataaataaagatctctacatttagtctctatttttttcctatttttgaggaaactctattttaaaagtgaccattggagcatcgtgcctataaaatagggtcactaaatttttgtaattagtttaagctttaatgtcgttgacacaatattatatacaagtggtaagtggacatgtgtaagagatattttaagggtttcggagactgaaatcaggctcggagggtttaggaggtagcaaaggtaggttgtttgtacgcagattgcgaagcgcgtttgaagcaaaccgcgacgcgtataacgttgcaaccaggctagacgaagacgccgcattgcgttcgcgttttgtgatcgcgtttcggaatcgatcttcttcttcggttaatgatctagctagtttcctccggcaatgtctccgccacgccgcttgtatgaaagacgcaccccaagttctccattgaaccgaataaaacctgacagttaaaccgaattaaaccaaacagaaccggagattggagaagcagagagatcagtcaaaagagaccaaacaaacctgaaagtatgttgaagctgtttgctatgtagtcgtctgaactgtgaagcaacaagcttgagatcatctgctgcaagagcaaaggcttctacttcggttaaagcttgaactgttctagtcgatatcggaaaatgagacgaagattgaggatctaatgcccatgtgagaagatcttcgccgcaaaagtcactaggttttaggtatacggcgttaaagaagccggtccggccaccgtttgtggtggcgctcatcagttttcctctcatgacaaacaacatctcttccactggatctccttctcgaattgcatagctgttctcggtgtagagcactggttttagcttgtcacacacggcatctagcaattgctcatccattatctcgaacagaggtacctatatatatttgattcgatcaatgattatttgaatgaaatgtcaaatttgaggatcaaagagataaggtggaactagaagcacttactttcttgagaagatcgaggcagaaatggcgtttgatgtctctcctgaggtctttagggagattacgcagaaggttttcttcttctactcctctagtttcctgccatttgtactgctcataccttctgatacgtttcctcaagtcatcgggtaacattcgatgagacatccattgctctgcatctctttttctcactctcatctcctcttccctcactgtagttgattccaagtatttctgttatggaaagtggaaacatcagtagtgttttatcttccttggggatcaagtaagtgatggaaaaaaggcagtgaaatgaatatatacctgcatattgccgataagtagtgcgaataagactagtccagatatacaaattgatacagcaaatatgatttccccaacgaatttgcttgtattgagattttgtcccaatgcactgcagcgagtgagaaacagcaagtgatcagattagtgtttcatgctcaacatatcttagccagccatcaagtgtgtcacatgaatcctaaattactaataactagatagagagagtgttacaaaccttaaattacgcaaaccccaccagaagcagtagaagaacttcttccagaaatcatctgattcaacaatcccactctttaaagcatcagtaaagataccaaagttgaagacagttgaatttgttatatcatcagggttgataaacgggcacgaggtagtcaggaaatcgtttctaacactactgtttccatcgcagtagagaaatctaaagttacacacttctggtatcttctcacaagcttcacgccagcatctgtcttctcgttctactgatattaagtaccataaggctccaaacacatgactggctaacatatagagagataggttccaagcagctccagcccaagcggtttcagtaactatgccagatgttcttgtaacttcagtgtaaagtggatagatacgaagaatccttggaatgtattgagtaaatatgacagttatcaaatagtccttagtgatcaaagagaccggcttgttgacattggggatgacagctaagactacaagctgcagcagatacaacagaatattaaagaaccatcaagaaggaactataaaaccattaggaactaaaggttacctgtgggagtggaaggatagaaagaagatcgatgatgaagtaggaggagaggtacttgatggctatagctttaggatcatcaaccaactcgcctcttccgaaaacacgagaagaaggagagatataagcagttctaaactgaaacacaatgtgaatgatgtagaaagcatctataaacgtgcgaagcacactagctgctatctccaagttacgatgcaaattaagacagtgtctttctccatcaacaataggaatatagaaaaacaatggatcaatagccaaagcaatcactgaagcaaaaagaaagattttgttccagttctgtaaaaaagatccttgtgggtttataatattcttctgtgtagtggtactagaattagaatctctcttcttattatgtgaaccaaaacttaaaggtttcttaagtcctctacgaacattcttcaaaactgtgtttagagatggtctagctttatttcttccgtaaccatactctgttccctctgaaatccaatctctgaacctaaacaaaaaatcatcaacaaaaaagaatattttttctgagaatcattcatatccatagtttctcagtaaattcattctaaaaaaaaaaaaagacagagattaaagaaagcaagcaaacaacaaccttacacgattgttgcggccaaaagccatgagtcaagctttttttgctataacggatcctgaatcataagaacatcgatttgatcgctttaattcgttatccccaagtttacagtaacagaaaaaaaaaaaaaagaagaagaagaagaaacggaaactaagaaattaaaacatttatatccgaaactgaccagaacgttgaagtaactgagagaagcgatataagaaagattatagtaagaattttccgatgatctgaaattgggaaaattctcgaaattaattctctgaagtttttttttgaagcagtcaaataagctatcatcgtagagtcaagcttggcatggcgctggaaaatggagactccattggcagtttcttcgaaattgtgtgcattttacaataaaagacaaaagagagggaattattaaagagtcaaaaacatttgatgggcctaaccttaattaaaagcccaattcgatattgaatttgattttaaaattcagaacttgttatatatcagaccaacacagtaaacatcatagattccagtaatgcatcagctataaacagatcctagcagtgtgaaatagtaaatatgctacgatttaaaggtttggatccaaagaattttaccaacttcatagcagattgttcacactctacactcaataagccaaatgtaaacaaaaagatgaccaaagatcttcacaaatctaccatgaatcacaaaatctatgaagacaatgtgatttaaagcaaagatcttacagtttttatgggctcttagttaaattttgagatagtaaattttcatataggcccaaccgcccaagtgagcaatcttgcaggacttttgtgttgtttatggcttttgtcttgtctgactcatgaaatcttgtttttttttgtagataaaagaacgataaatgacgcttttaaaactttttaaagacgagagttctaataaaattaggaaataataatatatgatgttgacaaaaaatgtagaaaaatatatgaaatttttattggcacgaaaaatttgtagcgaaccgcatcatatcatcacttatataagcaatattttttgaaaataactcatttgaatatcattaattaagcagatgagaaaaaatgatatgaggttattgaaatttttaaccaaattgttttttatataaaacatgtaacactttctgtttgttttttcttttatataattttgttaacacctttctatattttctgctttcaatattttctattttcttttattttgaaatagtatttttttttgtagggatttgaaaatagttttttttttgtagggattttaaaatagtttttgaaactactaactaattattaataaaattcaatgctttgaataaaatctaaatggtatacaaatattaaactttacaagaatatgagttaactatttaatacctttaagatttcatatttacttttgatgatatgtacattttaatacgtatatggcaatatcattggtagatacactatttctaacttaaattttaaaatgtggtaaaaacataaaattgaaatactaagaaatgttactttaacacttttatcctcaaatttggatttctggatgtttctataggtcgaaccaataattaaagaattgatagtaacaaaatgggttttaatattgattagaagaaaattaaattaggttaaagaaaaaggaaagagtagacgaaaagttaaataaattttaatagggttttaatattgattgatataactctctgactcttctgtgactcttttcaacttctgactctttctctttcgctctctcattcttaacaagaaaaaaaactggcatcatctcatcatgaggaactcttttcctccttcagacggtgggagatcgacgactgatcgtcgtcagcagtcgtttccctcatcctcaacgaaccgttataactctcgctctgcacaatcttctccgccgctcaaccactgtactacttggaaccagcaacactctcagtaccataacactaatttcccgccaaattacagacgtgatcgtgctccgtcgtcgggattctctcctccagtcacgcgggctaggcctaatttcatcgttcagctgcttcaccccgccgccgctaacagtgacacaaagctgtctaagaagcaagagatcgagagtatcgctttgctttgcgaaattccggaggaatcagttcacgtgcctcaatttggttgtatcgctgcaagcttcagttttcgtcagtgggtcgatgcgcgttctgccgttgtggctctttgggattatcgtcttcaagggagacatgattttgttcctgagctgattcctaatgttgttgttccgtctgacatggacgagcttaaagacaggcttcgtgatcttttctcgtctcatgttctttcgcttatggaaaatggacaaggggtcaagaaggtgagaatggagattgatgacaagtctcgtcaagttgcgtccttttcgtctaaaaggggtctgaaatttgaggtttttgagaaaaagaaggctcttgaagcggagagagatttggttgtgaatcggcttgacgaattcaataatgccatgaagagcattttgcgatatctcataggacaagacgggtatgagtttgatgtagatgatgaagatgacgaagacgtggccgtgttttctttggaaggggcctatgattggagacgtattcattatttgattcttagagagtgtcgaaggctagaggatggactgcctatctatgcctaccggcggcagattttgaagaaaattcattgtgaacaggtatctttaagaatctccaagttgacaagtgctctttgggtccaagctagttttgaatcacttgagtacagatattcgagttatgctgttgtcttgttgtactagttcatattgtctgctaaggttcagttttataaatgagtctgtgtttggtcattttgaattgattttaattgtgtttgtagataatggtgttgattggagaaactggttcagggaagagcactcagttagttcagttccttgctgattccggagttgctgctagtgagtcgattgtttgtacacaaccacggaagattgctgccatgacattgactgatcgggtcagagaagaaagcagtggttgttatgaggaaaatactgtttcttgtactccaactttttcgtctactgaggagattagttccaaagttgtatacatgacggataattgtctgcttcagcactacatgaaagatcggagtttgtctggcatttcatgtgttattattgacgaagctcatgaaagaagcttaaacacggaccttcttttggcattgcttagaaagttgctatccagaaggattgacctgaggcttgttatcatgtctgccacggctgacgccaaccaactttcacagtatttgttcgattgtggtattcttcatgtcaatgggaggaactttccggtggagattgtatattcccctagtggcacagaagagaattctgttgttggccgcattgcttcatatgctggtgatgttgttaagatggcagtggaaatacataaaacagagaaagaaggaaccatccttgcattcttgacttcccaagcagaggtagaatgggcatgcgaaaggtttgtagctccgtctgcaattgctttgcctttgcatggaaagctttccttcgaagaacaatttatggttttccagaactatcctgggagacgaaaagtgatatttgccacgaatattgcagagacgtcgctgactattcctggtgtcaagtatgtaattgattccgggatggtgaaagagagtaaatatgaacctagaacgggtatgagcatcctaaaggtgtgccaggtcagtcagagttctgctcgacaacgtgctggtcgtgctggaaggacagaacccggaagatgttacaggctctactcaaaaaccgattttgattcaatgaatcttaatcaagaacctgaaattcggagggtccatcttggtgtagcacttttgaggatgcttgctttgggaatagacaacatagcggcttttgagtttgttgacgcgcctgtcccggaagccattgcaatggctatccaaaatcttgttcagttgggtgcagtcgttgagaagaacggtgttcttgaattaacacaggaagggcattgtttagtcaagctggggctggaaccaaagcttggaaagttaattttaggctgcttcagacacagaatgggcaaagaggggattgttcttgctgctgtcatggctaatgctagtagtatattttgcagagttggtaactttgatgataagatgaaagctgatcgcctaaaggtatgattctgagctcccggttaatttttttgttgtggtatttttcttccatagaatgattaaccctttcctgttattttacgtttttaatttaccagtatacacaggttttgaacttttttagttttaaatcttcttacagcctgcttgaagatatgttctaaagttttttactttgtcatcttctaggtgcaattctgcaatgataatggagacttgttcactcttctttcggtgtacaaagaatgggcatctctgccacgagatagaagaaataaatggtgctgggaaaatagcctgaatgccaaatcaatgaggagatgtgaagacacagtcaaggaattggagatatgcattgagagagaacttactcttgtcagccctagttactgggtttggaatccaaatgagggtactaaacacgacaagtatttgaaaatggttatacttgcatctcttgcagaaaacgtggcgatgtacactggctatgatcagcttggatacgaggtggcattgactagtcaacaagttcagttacatccatcgtgttcattgctagcatttggccagaagccaagctgggttgttttcggggaacttctatctattgtggaccagtacttggtatgtgtaactgcgtttgattttgaagctttgtatatgcttgatccaccaccaccttttgatgcatcccagatggatgagcggaggctccgagttaaaaaagtggttggttgtagtagcactgtgctaaaacgattctgtgggaaatctaatcgtagtctgctttcaattgtttctcgtgctaggtctctttgttcggatgaaaggattggtatccaagtcgatgtcgatcagaatgagattcgactgtatgcgtctcccctcgacatggaaaaagtgtcagcccttgtgaacgatgcattggaatgtgaaaagaaatggatgcgtaatgaatgtttggagaagtatctatttcatggtcggggacaaatacctattgcactgtttggatctggtgctcagataaagcatcttgaagttgatcagagatttctgacagtcgatgtacattattatggcgacgatgttgttgatgacagagagcttctgacgtttctggagaagaagattgatgggtgtatctgctctatttacaagtttgctgcgaacaagcaagactgtgatgagaaggagaagtggggtagaataacctttctcactccagaatctgctatgaaggcaacagaaattcagaaatttgatttcaaaggatcagtgctcaaagtatttccatcactgtcaactggtggaggaattttcaagatgccttatttctcttccgtgacagctaagattcgttggccgagaaaggaaagtagtggtagaggatgccttaagtgcccttccggagatattcacagtatacttggtgatataaccagccttgagataggaacaaattatgtccatattcagagagatcaactgtccaatgattctatcttgataagtggacttggagatctttcggaagcagaagttttagatgttttggaattcagaacgcagagaagagatctgaattttttcatattcagaaaaaaatacagtgtgcagtgcccatctcctactgcttgcgaagaagagcttcataagagaatatttgcgcgcatgtcagcaaagaatccagagccaaactgtgtccaagttcaagtttttgaaccaaaagaagacaattacttcatgcgagcgttaattaagtttgacgggagattacatctcgaagctgcaaaagctttgcaagagttaaatggggaggtgttacctggatgtcttccatggcagaagataaagtgcgaacaattgtttcagagctccataatctgctccgcttctatctacaacactgtcaaaagacaattgaacgttttattagcaaggtttgagagacaaaaaggtaaaatttctacacaacatttgagcttttgctctttaattttcattaccttctgtcaacaaataaccttactgaatgtctacttctgactccgatattgattaagaacaattgtgtagggtaagggatatttgaagaatgcataagcttatgtgtcctatttttcctgtgaacttgtccaaattttgatgtgcattaacgtttgtttatatttttgtagggggtgaatgctgtctggaaccaactcataacggggcttatcgtgttaaaattactgcttatgcaacaagacccgttgcggagatgcggagagagcttgaagaactcttaagaggaaaacccataaaccatccaggcttcacacctagagtcgtgcagcatcttatgtccagagatggtattaatctgatgcggaagatccaacaggagacagaaacttacattctattagataggcacaatctcacagtacgcatttgtggaacaagtgagaaaattgccaaggcagaacaagaactggttcagtcacttatggattatcatgagagcaagcaacttgaaatccacctccgaggtcctgagatccgtcctgacctcatgaaggaagttgtgaagcggtttggtccggagctccaaggtatcaaagaaaaggtgcatggtgtggatctcaagctcaatacccggtaccatgttattcaggttcatgggagcaaagaaatgaggcaggaagtacaaaagatggtcaatgaacttgcacgagaaaagagtgcactgggtgaaaaaccagatgagattgaacttgaatgccccatttgcttgtctgaagttgatgatggctactctcttgaaggatgttcacacctcttctgcaaagcttgtttgttggagcaatttgaggcatcgatgagaaactttgacgcattcccaatactttgttctcacatagactgtggagctccaatagtagtcgctgatatgagagccctcttatcacaagagaagctcgatgaactcatcagtgcatccttgtccgcttttgtaacatccagtgatggaaagttgaggttttgctccacacctgattgcccttccatctaccgtgtagctggacctcaagaatccggtgagccattcatctgtggagcatgtcactcagaaacatgcacaaggtgtcacctcgagtatcacccgttaatcacttgtgaaaggtacaaaaagttcaaggagaatccggacttgtcgcttaaggactgggcaaaagggaaggacgtaaaggagtgtccgatttgcaagtcgacgatagagaagactgatgggtgtaaccatctgcagtgccggtgtggaaagcacatttgttggacctgcttagacgtcttcactcaggcagaaccttgttatgcccatttaaggacaattcatggtggaatcggattagtcgagttaggtgtcccagagcaccctgttgcccagcctgttcacaggctttgaaaccggactggacccatgtatctatatcctgtaacatctggtttgcttaatgtgtacatatatgtgaacatagtgtagttcggtatagtaccttctttaaccaattgaatgaaccgatcatattctaatccggatgccaaataaactaaagattgttgtaaatgaaagacttgggacttgactcgctacatcactgattacgcgtaaatgtctacagagagtttactaagttgaaagaaaactacttcctaacatacagagacatcgccattaatggccttaacttaagagtcaaaaaaacatttgatgggcctacccttaattaaaagcccaattcgatattcgaatcgaacccaccggcctaactaaactgttcagtgtccccaaatctttttgcaacttctttcttcttcatattcttctcaccgtgaaggcgtcgtcaccgccgatgttattatctccggcgatgttttctgatcatcactgctttactcttactgcgaggttggttattttcaaatcttcttctctccgttctttctttcgaagtcagaaactttgccgccattttcagtaaaagggttgattctacattccctagaatcatctaataactagggttttcattaggttacgtattggttaaaattagttgaaatcatgtttcttatttctcttttcgaactaaatttggtaatcagatctctagagtgtatgatttgtcataacatctaatcgaaattagaatccgtatatgtttcattcagagaataaatcctgacttgttaatttgatatagaatgtcagattctgatgaagctaaaacgtcggaggaagaatctcaacttgctgagcaagaaacagagactcaagaaggtgaaatgactaaaaacttaaagaaaagagatcttgatgcagtagaagatgaagattcgaataacgaaagctccagattagagaaactagagaagaagataaaaaaagaaacagcgaggaagcttgaaactgactttgtgctaacaggggaagaggatgatgatgcattgcccttagcctgttccatttgccaaaacccattcttggatcctgttgtcaccaactgcaaccattacttctgcgacaagtgtgctctaaaggtaatcttttccttacaacaagtttcgtaatttctgaaaacacactcaaaacagattttccttgttattttttttcataatgcagcatcacactgagaacgatacttgttttgtgtgtaacgagccaactctagggcttttcgacacagccgtggagatcaaggaaagaatagaggaagaacgtgagaaagccagaggtttgttaaaaacgcaaaactctctgttttgacaccaaaaacctactcttacaaaactcgctcggtgatgtctctttgtagccatggtaaaggaagtgacagcaatgttagaaaaggcatcgacaatggcggatgacgccaagggcgtagcgcaaaaggttgtaaaaatggtggaggagattgaaacaatggtggaaaaagtggcggctatggccacaaaggcgggagaaacggcgacaatggcggcagatatggtgaaagaagctgaggagacgatggaaacagctaaagctaatatgtccaaagcctttgtggtaatgaagtcggtgaattggaacgtgtaaatcgggtcaaaacagagttttattgtgatctcatgctgacatcagctacaatctttatctaataagatagattctcacaagattcttttatctatctactttttagagaagatgagatcatacttcggagatagataggtgtcgtaaaaattgggaagcttacttggcaggagaagagagatatacacacgtgcttaaagtcaacagctaatccaaaaaggtagacgacaaaccagttaaactaagacacgtaatctatcttaaagatttgtcggttcatcgtaaatccgttggtggattaatatatgtcggtgtcttcgttgattttcttagcctaaccaaccaaacataaataaaaatcgaagctttactttgtttgcttctattatatccacttccaacaagattcctcaaaaggaaagaagagaaagaagataagagatatctggttggtcggagatggagatgatcggaggagacgatacagatacagagatgtacggagctctagtgacggcacagtccttaaggttgcgtcatcttcaccactgcagagagaaccagtgtacctctgttctcgtcaaatacattcaagctcctgttcatcttgtacgctcttctattctctcatcctctgtttttctttctctgttttctttatgtactttgttgaagttaattctgtctgattcaccgggaaaatgaaatttcgccggatttagggttcccgatctttctatttttgtttgcaaattctcgttttttttttagtttacttgttggtctctcttagtcttaaagctaaggatagtgaatatacatatatgattcaggtttggtcactggtgcggagatttgatcagccgcagaaatacaaaccatttataagcagatgcactgtaaatggtgatcctgagatcggttgtctcagagaagtaaatgtcaaatctggtcttccagcaaccaccagtacagagagattggaacagcttgatgatgaagaacacatcctcggtatcaacatcattggtggtgatcatagacttaaggtgactaaatccaaatctcatagtattcagaaacattagcggttgctataatggttattgttttctgcagaattactcttcgatcttgactgtgcatccggagatgattgatggaaggtcaggaactatggtgatggagtcttttgttgtggatgttcctcaaggcaacaccaaagatgatacatgttacttcgtggaatcactcataaagtgtaacctcaaatccttggcttgtgtctctgaaagattggctgctcaagacattaccaattccatcgcaactttctgtaacgcttccaatggatacagagagaagaatcatacagaaaccaacctttgaagatttggctagattagtcccacgaacaaactcagtgaaggaaatttagattcatagaagcacgtgtgatcatgcttctctgctgctttactcagatcagctccatgggccattttcgagcatgcagtcaaagttttgatgtaatttgttttctggtgtttgttggacagtgtctgtatttacgcaccattgttagaaaaaacagagctaggtagtatctatattatcaccaagagtcgttgcaggaacattttccgtctctgaaatgatgaacccttgccccttcttgtaaaacaatctcacggtttctcaaaaccgacatgtatttggctacggtgtggctatcagaacatatattcgtgtttttgaccactcttataggagctaagcctttcttcttgataaggccatacgtcattgctaacttctctgtatgtcccataagcagcttctctttctctgaatcacttatgtcttggtgtatacagcttgtgtctggcacataacctgatttcttcatctcagagactaatttgtacagctcaaagtatatatctccttcatcaggatgtgtttttccctccgcatagaagatgtgaaccgtttgatctatctgaatccagctccacagatcctggactctcaccctgttattcctcattaagttccgtatacgttcaacatcttcccatctgttcaaattactgtacaagtttatcatcatcatgtagttagctgaattgtgtggttctagtacttgaagcctcttccaagcgatttccgcgagttctaggtctctatgaatcttacaagatgaaagaaaagcaccccaaatagttgcatcgggttttaatgacattgtttgaatgaagtcccaggcttcatcaagataacccgatctcccgagcagatctaccatgcaagagcagtgttcgatggtcgggattataccataacgagacctcataagatcaaagtatttccacccttcttggacaagacctgagttcttacagacagacaagacagaggtaaacgttatagcatctggttccatgcccgcttcaagcatcacactgaaagccgcgatcccttcttcgcctcgcccaaacatggcataacccatgagcatacagttccaagaagctagcgatttgttcttaatgccccagaaaatctcaatcgcactttgcagatcccctgattttccatacatatctactagtgcagttgcaacatatgcatcgcagatcaaatttttcctcaaacagaaaccgtgaacctctttgccactgtgtagtagacttaagcaacctaatatcttaagcaaggtggacatagttgctgcgttcggaccaacaccttcttcctgcattttaatgaaaactttgagagcattcctgaagtttccatttttggaacatcctgaaaaaatggctgtccatgaaaccacgttaggggccacacctttctccttcatcttccctatcacatctaatgccttctcaggtttccccaaagtcgcatacccagaagcaagactgttccatgtaatagcatcaggtttgatcccttccttctccattctaatcatcaaagcttcagcatcctttagaagacaagcgtacgaaagtcccgagacgagtgaattccaagcaacaatgttcttcgcatccatcatatcaaaaaccatccgggcgtaaggcaagtagccagttttaatatacatgtcgatcaaggtggtttctacatacacatcgtaccaaagctgatttcttaatat

SEQ ID NO: 507 - DNA, 124225 bp, Arabidopsis thaliana
gaattctcttgcttactcttgcctgactctatatggatatatctcttcacttactctgtgttaaggtgttaacttagatagcgattttagaacagctgtattgtttgctagagctaatgcaggctctgttcgtctcataaaatccatttaaattggcatttgagcaggggcaccaattctgtgaatggtcgttttgcactcttgaattttagacaatcggtctcactttctttatctcgtgtcctaatcacaggtatttcctgcaccagcagatcgagagaggataaaatcatgtctatccgagctaggcgagttaagcagcacgttcaagcagttactcaactcaggcatggaacagctagtagcaaccgtaacaccaagaatccgtccggttctagacaccgtggctaccataagctacgagttaacagaaaccgagtacgcagagaatgaggtgaacgacccttgggtccaaagacttctccactcagtcgaaacaaatgccgcgtggctccaaccactaatgacatccaacaactacgactcgtttctgcatctcataattgatttcatagttaagagactcgaagtcataatgatgcagaaacggtttagccagcttggtgggcttcagcttgatcgagacacaagggctttggttagccatttctcgggtatgactcaaagaacagtgagagataagtttgctcggttaacgcagatggcgacgatactgaacttggaaaaggtctcagagattttggacttttggggagaaaactcaggacccatgacttggagactcacaccagctgaggttagacgggttttgggtctccgggtcgagttcaaacccgaatcaattgctgctctcaagttgtgatgttacttcttttctttattatgtcatctacacaactcgaaccaattctttcgaaatctgattggttcctcaaatattttaattgaatgaaaacttaaattaaaaatcaaacggtaaaaaagttaataagtgaaaacaaaacccaaaaactgcatttatttcatttacccttctaatgaatttaagcagtaagagaaagacagtcacaattacaaatatcacaactaacaagtagttaatatatatatatgtctatgtttctagataaggaacgttctatatttgtttgattcatagaaatagaagctcgtatgagaccgaaagatatcaatttaattatctacatatacatttttgcagctattttgtgaaataaattctgtagttgagacttatttacaatggctgatactagattttaatgtttgtttttgataattagaaaaaaaatcttcgaattaaatatttgacatttaacaatcttctctaaatctctccacattaactacacgattagttactaaaataaaacttccaaaatatttaatatcatttaattactacaaaattatcatttttgatattggtttctccatgactataacaactcgattataatcatcaaaacgcaaagatatttgataacatttaattactacaaaattacaaaatatttagacaataattcataaacgtatcataaataagatcaacattaataaaataaatagtttttttacgggacggattggcggaacaggtttggcatgacgatacttaataacaattgtaaactataaaataaaaatattttatgtatagattcaatttgcaaacttttatgtatagtaactttaataaataaattgttcccgcagtgtactgcgggttcaaatctagtaatatactccctctgtttcatattagttgtagtttaaggttacacacaaattaagaaatcataaaaatctcatttaatatacctcttttatataaaaacttcatttattataaccaattcaaccaataaaaaaatagatgattaaatataattggttaaaaaatattaaatacatttattatttgcatagaaagttgaaaacaacacttaaattgaaaaaaaaaaaaaccgttaaactacatttatatagaaacagagggagtagtaatttgaaaagaataataataataaatgttaaagtatttctttgagttgagaatttaggtcgatttttacgaacatatgctcaaatgtgacgtataaataaatgcgtatcaatattgatgctttgttcaattaccaaaaaaaaaaaaaagatgttttgttcgattcgataaatgttgggggcaaaacagagagatgagcaaaacatgggatcccgataaataaataaagacaactcttgtccttgtataaatagacttgcatcttcaagatatatatgtacaagtctctttacacctaacaagacacagtactaaatcatttgcagcttcttacaatgtcgcgaccaatctcgcttgaaggtgaaaacataacttatgttgtgtctgatgatctcttagtatcattatgagttccaagttttaataattttctcattcttgacagaaatggtgagactgttcaaagtacgtcacgcaacagctcacatgttcaagatagaccatttctctttactcagaaagcatggaatcgaaaaggtcgagtcctctgttttcgatctcgctggtcacaaatggtgaagttgtttataatcttgttattatgcttattgacatacaaaagaaaacaaagatggtgatcatcctcttaacgacttgattggtaacaggaaactctctgtgcacccaaatggccatacaaatgctaaggggacacattatgtctccctctacttaatgaatcaagctccggtatatgatacgcttacatatgagcttcttgccgtcagtcaacttgagccaaaatggcacactcacggtctctctcactctctctctctctctctcttgcttcattcaatcacgcatacatctgtgtgtatataggtttgatacggcgtccatatatgttgatgtgcaggaagagatgaatacgaaaccaatgaagaactgggtagtgaggggtttcgtgagttcatatctcttgttgatcttaagaaaaatggtttccttattggagattgttgtatgtttggtgtcaagttccatgggattgaacctgctaaacccggaacagcggaaagttttagcttaatagagaagcctcttaatcacagagtcacttggatgatgaccatgttctcgtccttcaaccctggaaacgttcatcagtctaatgaatttgtcgttggaacccggaaatggttgatattatattcctcctttttcccaaaaacataacacaacttatatataatactaataaaaatgcatcacaatatatttgatcaggagaattaaagttcatccaagagggtctatgggtgaaaaagacaaatcattttctgtgtatctatcggcactagggtttgtcaataatgcaccaaagactaaaacttacgcgaggttcaagctgcgtgtattggatcaagttagcaggaatcatgttgagaaaacaagtatgtgtttattatgttttggaaagtcttgtgatgcatgatggttaaatacagtactaatctttttctcctggtacgtatagtttcgggttggcttggtgcagaacctgatgaccgccatggctttgcggatttcatgcctctaggggaacttgatgacccttatttggtgaaggataagctttatgtgggagttgactttgatgtcatttccgtctctaattactgttagctatataatcagcaagaaatatttataacgtatgaataaaatgctggagaatatatatagtactattatgtaactaagctactgatgccgtaatgacttgtgatgtgtgtcgacgtacgtgttgctggagatgaagatgatgtgcttggcgtgtattttcagtttatgggcataacaagacaatctacaagatttcataagcccagtttatcaactatagagacttggttctcaatcgttattgtttcttgttagttttgttttgcaaataagatcttgtttttttttcaaggaatcgtgagcattccattgcttttactacctatatatatgagaaaaacgccaaaagaaaagacataatttgtttgccaaaagaaacttgtgttccacgttggggattctttgatcttcgaacacaatcacaacctcaacgacgtcactcaagtctccggcgctttggaatacgagttctgcgactcttcttctcctaaagccgtctacaaccctggacacgatatcgtaaccctcacggaaccaggttttcactagttcatcagctcaaaccatgctcaatgcgcatcgggacagaagctcgacattcttgtcgttcatgactcgtcacgtcccattcctccaacaccaccgagcaagatccttcctccttgaaatatctacagagttggtgtggctccaagggatggagtgttccgcaagaaagttacttttattacagatggagtgagaagacgcagtttccgatcggagacagtcttcttttcgaatacgacaacgaagtcaacgacgtcttagagatcagcggggaccttgaattcatatcctgctacccgatttctcccgtagccgtgcacatgacaggccacgatctcgtcacgctcacagaaccaggagtccattatttcattagctctaagactccaggtcactgttacgctgggcttaagctacgagtcgtggtcggaccactcaccaaagccgtacctgtccccaatgttccgacgaagaagatagagttgtcacttatggaccgcttcaacagatggttacgcaccttcggacctcaaccccatcattaagataattagtggatgtaattagagttaagacttctctgtattttctttcgactaaaaagtaaggaaatttaaatacactctattgcaaaacacagctcaaaggttgttcttttctttttttccaattttttaggatgttattcaaattacagacatattatcaaacttatcagagatttgataacaaaagcagagcaaaacaaaacatagcattttgatgagtttccttttaaggatatatatctctctctctttctctcacactgagtcttgaggattgaacttgactgtttcacggtatataagctccttaatgttctcttctgtcaaagtaggttgctcgaaatcaaaattgaacggcctcacacataccggttcttcgttgatatcatgcagcggcgccaaatatgggtggcacaacgcctcatcaactacacacacaaaaaacatgttcagaaaatagccgaagaaacagagaagcagttatataaaatataactcacctgtgatgcgtctgcttggatcaaaaacaagcattttctccagcaaatcgactgcaccagccgacatgtttgggaatctagcagcaaagttctgtctagggtactgtggaagctgtctaacgtatcttcttgcattgtcacttcttaagaatcccaagcttgagtcatcaggagatcctataagctgctttccaaagattcattaataccgtgaagagagactaagtggtgattctttggatgaaacatactaaactagattacctcagtgatgagtctaagctgatgaacataatctttaccgggaaacaagggctctcgtgtcattgtttcaccgagtatacaaccgacagaccaaatatcaattgctgctgtgtattcagagcaattaagtagcagctctggagctcgataccaacgtgtaacaacatattcagtcataaagtcagtctcggatttggtcctcgcaagcccgaaatccccaagctttagatcacaatttgcattcaggagcaaattgctaggtttcaaatctcgatgcaatacattagctgaatgaacatatttgagcccacgcaacaactgatacagaaaaaactgcaaaacataatcgaaactaattactaaacacaacttcaaagcataacaaacgaaatccttattagctctcacttataaagtatcaagcaatactcatcagatgctctaacacaataacagctgcttctaaagtagaaacagaagattcagctgctagatataagcaagatggagattgatgcatacccgacaatgatcatcagttaagggttggttagagcgaataatttggtggagatcagtgtccataagctcataaacaatgtaaacatcattgaagttctctctctgcggtggttttattatatcctttacagcaatcacctgcacaataaaccaatataagattcacacaaaaaaaaccagagatgctgatgattagtaacacgtacattttcatgatccatatgcttgagaagcttaatctctctcaaagtccttttagcatcgataatattgtcaaaagcattaccaatcttcttgatagctacctcctctccagtctctgagtttgtagcagcactgatcaacaattatcaacacaagttattataataacaacagattccaaaaccctaattcccaaatctaagaaccccagaagtgaacattacatgtttcaaaaacccaatctgattaattttggaactcaccagacaattccataagcgcctctaccgataggacgaagaggaggaacatactttctagaaacttcgaagagattgccatagacattatactgaacatagctaccaccatgagtagccactcctttgctgctgctttgatcacccgagcttccgaaacaactctccgccgacatcggagcaaaattcctcacaacaacgaaaacgaagaaccctagagaaattgaggaatcgagaagatgggtgttgacatttcgttataaagtctctacctttacccttttttttttattgaacggtaaagaggaagtctcctctcgagtcacccgtgacccttaaaccgggtttgcgtcttcttctttggtttttgttctttttctttgtaatgtcaattttcaattttgtttatggtatcgagttgggtatatccgatgattgtgtctctaagtaattgaggaacgggtaagtgtttttagtcaattggttaagttttgtttactggagtttgcttctactaaatcgcgttatcccacgaagtagagattagatatggttatgacttttgccgaaaaaatgtaattgatgaagtttgtagaatggaacaagttaatgacttcatgtaggaatgttcttgatatcatattataaagtttaaaagaatctagatgacaacttttctccaataagaatttaagtacgacttggtatattggtggtgtacaagtcaatgggcggccaaattgtttttgaccataaaactgacctttgattccaaaaccattagtgaaaaaaggtttatgtataagataaaatgacatcattttgattttttttaaaaaatcatggttaaacaacttatataaccatgttgaagtttggtgcatttgttattattaatagctagaatatctggtttgctttgattgattgatcatgtaaccatgaaaataacactgattttttttggtctagtgatttacaatgggcctcaagcaaacccatcacttatccattatcaactaagatgaactaaagcacaattctgactaacttgaaaatgtagttatagcttagcaccgattgaaaagagagagttatcaatatttgaagcgttttaaagtctcatttttatctgcatttgttattacttaacatcaacgataccataattacatgtttcctctatattcacaaacaagtcttagctcttttcctctatattaacacttttaaccatcgttggcaatgtcactcctagctcttctgcgcatttcgtccacaggctctccaacaatgcgtctcgggcagagatcaccatcttcgacaagcaacgtgtttccttggagactagctcaaacctttccgaaagttctatcactgacttctccaatggttccactaacaaaataggaaccgacccttcttgtaccgctgtgtaaagcttcttcacaccggtttcaacagcctcgagatcttttataaccgtgaatccgtctgataaaaatgtgtttttgatctccgggttaatagtgttctgcagttccatgaaagcttgaacccatggaagctcctccatctcctttggaatggttagatagaagagattcttggaagaacccgagaacgatgcatcaaacacgctgaatatgtataaagtcttgacctttacaccgtataaaactcgtaagagaacttttccttccgcagagtatttcttcttccccttcttggagatatgatgatgatgatccatcgattcaaccagcctactcaaaaccgcgccccagttttcgatactcgggttcttggaaaccatgtgctgattccaacgctgaagaatattgccactgtttgtctccagcttactaaaagcaaactttagtaatagattgccatgttccaaatgatatatctctgaggtaaaggcgttgcagagttcccgcttcaagctaaagtcagagaagatataaatgaaattctcctccaaatccgatactggaacctctaaatccttcacgagcgtcctgatactcttgtgtgtctcacaaagagactgcatggcttgtatcatccaagaaacactaacgatatcattcttatcctttggtacaagttctctaatcgataccgtcaagttagtctcgaaattgttcaacagtgagagaagctttggcgataatcgagcattgttcttcttcgtaaacagaatcttgaacgggttccgagagcgtgtacgttgttggctcatatcaactgaaaacacacagaaagaagaaacaaagttagtaatctgaaacaatgagcaaaccaataacattgttctgaatccaaaatccgaatcaatagatctcaagaatgcaaagacagaacaaaaaccattactttaaccaaactcgccgaagattaacgaaaactcacctaaagaaagagattcttccgaaatgttaccgcttacttcaatgttacgctacttcaatgaaggagagaaaaaaacccaaaagaaagtataaataggagatgggtttagtgtatgataataaaacttgaaacgcgttcttatagggaggaatcaaagaaacgtgccgtgtgctgcagatcaacgcaatcgctactttaagtcccgcgttggttttggtagttgtaaaggatttttccgtttcacctacgcggcagtgacgaagaatagagacaaatacacacgtttacggttctgatgtctcagttatagtagatttttccactcaatcgttgacatttgtcagcataacgctctataagaaaaagtggtaaatatagccgccggatatttatcaatccaagggctataaacttctggtttcgtctttaaaacaattctttattttgagggtatatttgtcattctcacgttgcttttcaagcttatattactgggccgcgttgggcttttattgggtcaaagcgacaagtgagtttgatatatttcttagcgctaaagtagatgaaatctttggaaagccttcgatgaatctgagaggcagcatatgatagattatataaacaaatataactaatttatatcattgaatatatttaagatgtaatttgatattatttataaattttcttctttagtataaaattgaaaacaagtatttatactattaattgggaagtattttgtgaactacaacattataagggtagtttaaaattaactaaatgaaattttacatgggtaatttagtaaattaactactactaaatgaatttagtttccataaaaatcaggctattgatttcgaaattgtatatatataaatttattcaattttggtaatatattttgagatatttctgaaaaagaaaaaattaatttaatatcatcatatattttagattttaatatatttccttaagaaactacactaataattttaaaacatttaaaaagataccttcaaggcttcaatctcttagataattttaaggacaaaagaaaattttccaataaaatgtaactattatgatatctatgctattatataattcactaacccaaaaaaaccaatcttaattaaaacttttcgcaaactttttacattattttccacacatcttattttcaaatattatgataactgataagtttatgatatatatactattatataattcactaacacaaaaaaaaaatattaatacaaacttttatcaaaaccatatgataatacttacaacccgcataatgtgcggttcacaacattagctattgtgtcataaataacactatacattttttgtgtacattataatttatatactacaatatttttcactaaaaaattatttcaatacattttttaaaatatgaaattccgcacgtatgtgcgggtcagaatctagtttatattgtaattttattacaaataattaaattatactataaatatattttatcaatgaaaataagctacctacaattttatacaacttagaatttgatacatacctacaattttttgaaatggcagctctagctctttcagtagagagtccaagtaaggacatgagatttatgacatcatttgaagtttaaacctctaagttgtgtgattggagcaccacttgatataattagattcttcctcctaggccaatgcaccattaactaaatataccacatcacaagacaaactatgcaacttgttataaaactttcacataatcaactaattgacggtaaaatattccacggaatctcaccttagcatttgatatatataacttgtctcctcgtttgtgcatccataaggagatcagagtacataatctcaaagtaaatccctcgctaattcattaaggtgaagcaaatataaagaattagatacacacatacaatcgaaataagatgaagatcaacctatgaaaacaaacaaaaaacttcaatttagtagaagatttagtggttagtttctttcttatttttgtgtacttaaagacttcaatgtcaagttaaggaggtagacttgaaaattgacaaaacaaagtttatctctttggttactttgtgtgttcttgtgttaagacaaaacacatctctttggctttgaccgtgttaagacaaaacacatctctttgttgtttacctaattctttgttaatctacgtttgaggatcgaatccatccaggtaaaacgatgctagattccagaaaccctaactatgcagattaacaaataattagggtaaacaataaagacgttgggcagaagcatacaggtttcgtggtgtagttgtttatcacgtcattctaacacaactaaggtttctggttcgaacccggtcaaaaccactatttttagacaaattttgttttgtttcctttgttactgctttgaacttaattccatctcttttgttcattatgtgatcatgctctcgtataacaatgatcatgatgatagtatctactttcttgataaataagcatcttttattagaaaacaaaaataacactgtattacatatcagtttttggaaataaaaatagaaacgctaatgaaataatacaatcatgatagctacaaccactcattatatcattaaacataagttcaaattttttcacccaaataactcaataaacatgaacgggaacatatataccgattgtattcattacgttcctttaggatgacggagaccttgcatcgagattgacactggatgcataatggccgagtgttgcgattgttaggaaccgccccaaacttgactttttccccaaaccaatagttttgtcctagcacgagacgtgagaaatctcctaatacacactgagcatgcaaggtgactccacaatcaaaacatgtatagaaccatatacttggatctaattccttctcacaaatgtcgcaccaatatttatcgctcgcctcttccttttcctcacaacataaagtgagagggtgcccatcattcctgtgccatatcttttttggcaaagtagcacaatacaaacacaaatcaaagtcacaagctttacaacgaagcatataatcatctatattctttttgcatccatcgcaaaagtgaccctccattttatcaaaatttaagggatgtatatggccatcatgaacgagcggctcatttagggaaccacaatgcacatctacatccaaccagcgggagctgtacgcgaaaccatcagaaaatattccacacaacgtgcagtctgtaagttgggtagtttctttcattaatgtgtatggtctggtgccgaagacaagtcttttcttcataggaagattagcacatttttcatggagaatgaatggacacgtttcacagcagtagatggagccaaatccaagaggatggatacatgctgcacatcgtttgtgctcatcatgaatgaagacgtcgtccttctggaaccttaaaggatgctcttcatgactaaaatggcatatcaagttatcacccaccaccttgaatggtgaattgtcttctgtgatctcagtggtcccttccaattctaccccgtcccatacgtcagttctcacggcacatgtagaatggacagcatagtgagggcaaacagagcaagaataagcccccttgtactgatttacattttcgtgacaaactccgcatttcgaatacccagtaccgagatgatgagttaaataaatgcgatgatcatggcgattgatattgatgacacgagctaagtcgatacaccctcttgcagtaacaaaatcacactgaggacatacatacaccgcaaactcgcatttcttcccacaaatgtcacagatacacgggattcttctaggaaagagaataagtgggtgtttgtgggtcttgatatgctcaataacgaggagtggtgggtttttggtacaaccaagacacgatgtgaaattgcaaaccgaacaatgataaagcatattttcagctggcttctttccacataaaagacaagttgtctcggcatcatccgtaagtgactcaaatgggattaacttgagaggatgagcagaatgacaaggatgatttacctctttggagagctggatgcaattcacgtggaagtacacatcgcattcaagacacgaataggatggtccggcaatagaatccttgcacaattcacatgacaccttctcctctcgtttcttcaagaagacaagtgaatggtgatgacacagcggatgttcgatagcaggcggtgatggtttcatcgcacaagtcaaatccaccttgaactcacatgtggaacaactgtaacaaggaggcaatagcttctgtccacacagatcacaaggaccatcaatcgagtcattggtgagcaggagaggatgttgatggtgggaactatggctgatctccgctggggcctcagcacactctttatggaaccaaataaagcagaaaggttcattgcaaaagtagccgttgtacatgtaaccatttacatggcagccatcacattcacctataatacatcgagctgaaggataaagagggtgctcatgaattggtaggtttactgctgttgtagccatttttttgatcgtgtacaagtcaatgaatcaaaagggtttgctaatttgtttgatgagatctccaagactccaagtgaagatggaagacgttgatatatgcctctgtaatcccaatataatagccagtgttaagagttatttgcaaaatgaaccatcacctatcttaaataacaaaggacacccttctttcttacataaacacacgtcaattaaactttgtaaatatcacctattctttttttccataactccaaaccaaaacacatataaaccgacctaatagcctacgcatctagagatttgtggacgaattagtttcctagtggatgaatttgtttaatcgttgcgctgaattctactggcttggaactggatccggcgattatactttcatttcgactataatctaaaagaatacgaattaaacaacaacaaaaaaaaaaaaaaaactatttgttacggttgtgttagcctcagtttaacgtaaggtcaatcttgtctcattcagaagcttgggctaaaagaatattaaagagaattcggagacattattgcaatttaccataataagattaatcagagtcagattcagaatataataattaattatggattggatgatctcgagactttttttataacgattcaaatacagtagttgaacttaaacaaatgtcccacaagctaattcttatataatttagttgtagtagacgtggtcgtcggcgcctttgcctttgaaattttctaaattgataatatatttttaaaaatggtcccatgcaaacagctaagagatttagacttctaatacatattctactaatttgatgcgaatcacgaattatcatgaattaaacgacttatatatatatatatatatatatatatatatatatatatatatatatatatataaaggatgtcacgatttaatatatgactcggaactttttacttctttacaaataaccggagattgtaacatactaacatgctagcttttattagctcgataattcaaattcgaatttggaaatattcatagaagaaaatggtggatttatgttgatgcacgagtgtttagagaatttatgaacgttttttctttttagaaagtaatgatttttcggaatgaatgtaaaaatgagaataaaaggtggatgtggatgagaatttattcggactagaaaagtttagaggtattttagtgccgtaataatatttgatcaaacaaataaaaaactaattactcagatgttatttaaatttatacaaattttccacaagttaagtggatgattggttgggttgtaactatagaatttttgctgtaaaatttttgatgtacctgtgttggctatacctgtaacttttattactgtaagtttttgattttaaatatttataaaaatagatttgtaaatataatacttgtaataaaatatatttttatagtaaataaaataccttgtattactaatttaaataaatatattatgatgatataaaaataaaataaaaccttatgaattattgataaaataaatataattttacctataattatttcataaatttattgtaatatcatctcgaattccttccatatattgcctagaatcaatcatttggtcatcgtcttgtactttgacctcttcatatgatatttatttataatcttttttttttaggtttgataattatcatttttttagaacatatctttgtttttattatatatttttgttgataattttaatttctagaatttatttattgaattaaaatttttacagtaaaaaaattagagctttgagaatttactcgactataaccttaaaaagaaaaaaaatttagactgtaaattttacaataaagttacagcatgattgacaagtaatcaagactttagtcttacgaaaaattaatgctgtaaattagacatacagcccaacaatcatgcattgcacatagtccaaaattatttgtcatagacgtggacaacgttacataaatgtaggtgtcctcatttatcgatttgaatcatccttcaaatcttgaaattcaaaacagctaaaagtctactcttcgagtaattcttaataatttgatgatgcgaatcttaagttattaaggctgagagttgtcaggacacaacaacctataattagtttactgttttcttttttaaaagaaaaaattgattagtcaagactcaagagacatgcccaaaattagcattggatttgtaacaacttttgaagcactgagaaaaatcaatatagttaacaaaactaagtatccttagttatatgatattatcttccatatgggccttcttaaaccataaacgggtttaataatttggttgggcttgaatctcaaaaaaaaaagaaaaaaagaagaagaaggaaattttgtaaattttaatctgaaccgttgaaaatcagctgatgatatattgatcgcaattgcttttacaactctcatctataactaatgctcgagaagttgtgtttttggtttgcccaataaatacagtaatttgggaattgtgattgaagtggtttagggatggttcagagttttccaaggagattgtcttcattctacataacaatttatcagattgtggatgattatgccgaaacatgtagaatttggcagacatttctcacagattacttccaagcttcagtatcataccttacaaggctaaacgtgaagcaaataaagctaaagccaaagccaaagcaacgagagctagagtgcaagtagagtttgtcttgcaatatataggaactttttgtgtcttctttgtgtaattcaatgtgtttatgaactttaagtcttatccgtttcaagaagaacgacaagctgacagctgtgaggacctcaaaggcctcttcccttgatatttactctgcttttgagattggagtactcatccaagtgtatgataaacatgagtgtttttcttaagtatttgcaataaaattggtatgtttgaaagaacagaaaatttaagtgatcatgcatgctctcaaataacaaggaggtcgatggtgtttagttccttgcaagtttgtgtagttgataagtcccaaaaacaacaagaacagaagatctctttaatttaatggtaatttaaacttttgatttttatacaagcaaatgtacaagaagtggaatcgtagagacttttatatataacaaagggaattaccacttactttaggtttttcattggtttaatgattcggtttgatgctggtttgatcaatctgcatgtgcacctgtgacttcatctttattggtgtataatacataaccagcatttaccattagaaaacaaaaatcactctctgttacatatcagttcttgcaaataaaagaggaattgaacgacgctaatgaaataatacagccatgatagtctcttcccctcttggatggaatcccaaaccgttcaaattcctgccaaatgcgagggtttataattaagaagatgataaattacacatataatccatagtagaatttaaacacagaaagataaacatgtctctcacctcgtctttcgggtaactattccacagattattaacagatctgtatgtgtcatcagctgatgctttatctaacccagcaaagatctcgtgtttcccgtgcaacaaatatgacaaaagatccttttcacattctgaaaaagaaaacgacattcatgaaggttaggacttattaggatctagagaaatgaacatatcatcacgagaatatagttgagtaccaacggtttcagcagcgacctcgtaatatttggcttcaaggtttttcaaaagttcctcagtgtcgagttcagttgctttcgtgacatctgataactctgcatcctccaagctccgttcccatacaccaaaaccattgatgttataaagcatccgaatagctacgacgataatagacataacacagacacgagtgggaagcctgagctccttctttgatagatacaaatccgaacgcattgaccagtactctaagagacggaccagatcaagaaccttgtcctctttgggaacagacaaccgcattagatagtttgaagctatagcatagaaattcacaggaggcaaaggcaaaccgatgatatcagcaatcgaagcggcttgtgcttctaatatctgagcagaaaacaatctgactaggcttaaacataacgcttgcagacacaggacacgcagcagatctctctcccatctgctctcgaatctttagagaaagataaggaatctttccttgtcgtgcccatctaactatatccgtgggtagaattggtgtcccagctttgtgacaagcaaggaaagacagagccaaagaagacgataaaggcagagactttgtaagctgacttaaccatatcgttactgctcttttaccatataagttctgaggttcttcggagttagctttaccccgcttaacctctggctctcttctcggattcaagaatggccttattagcccaatcatcatcgaagacgccagagagagccataaaataagcatctgtagaagtcgaatagctctgtgctagtgtagaagtccatggttttgcttgtacgtttttgcgttagttttcggagaagctgtaggcttctatctcgaggttttgtggacgagcctcgaatagtttagcttgtggcaactaagatgaggattccagtgcttctcatcggtggcaaccacgcaaatttccgagtttcgcgagttcggaatcggtgtttcatctcgtaacttggtcttaaacgcttagaagcgatccgtaggaatttaagtagtaatattgtatttattttctgtagattgttttaatctgtttcatgtaatctctataattctgtcaaaaaccaaaaatgatataaaatttaatctgttacaaaaataataataataactttgtattacatatctgttcttggaaataaaaatagaaacggtaatgaaataatacaatcatgatagctagaaccactcgttatatcattaaacataagttcaatttttttaactcagataactcgataaacatgaacgggaacatatataccgattgtcttcattatgtttctttaggatgacggagaccttgcatcgagattgacactgaatgcataatggccgagtgttgtgattgttaggaagcgcctcaaactcgattttttttctcccaaaccaatagatttgtcctagcacgagacgtgagaaatctcctagtacacactgagcatgcaaggtgactccacaatcaaaacatgtatagaaccatatacttggatctaattccttctcacaaatgtcgcaccaacatttaccgctcggctcttccttttccccacaacataaagtgagagggtgcccatcgttcctatacaatagcttttttggcaaagtagcacaatacaaacacaaattaaagtcacaagctttacaacgaagcatataatcatctatattctttttgcatccatcgcaaatgtgatcctccattttatcaaaatttaagggatgtatatggccatcatgaacgagcggctcatttagggaaccacaatgcacatctatatccgatcagcagactctttatggaaccaaataaagcagaaaggttcattgcaaaagtagccgttgtacatgtaaccatttacatggcagccatcacattcacctataatacatcgagctgaaggataaagagggtgctcatgaattggtaggtttactgctgttgtagccatttttttgaagtcaacgaatcaaaagggtttgttaatttttttgatgagatctccaagtgaagacggaagacgttgatatatgctattattaaagaaaagtcggagacactattgcaatttaccataataatattaatcagagtcagattcagaatataataattaattatggattggattatcgagagtctttctttataacgattcaaatacaatagttgaacttaaacaaatgtcccacaggctaattcttatactccctctgttattttttgtttgattttttagaaaaaaacacacatattaagaaaatatatattaaatgttgattataaatgtattatttttagtgttttacagttttttatacctctaaaccaatgataattaactatttttcttaaaaattacaatttaccaatactaaccaataaatattgcatggaaaacttaaaaaatcaatcttttagaaacaaattttttttctaaacaatcaaacaaaaatgaacaggggagtataatttagttgtagtagacgtggtcgtcggcgcctttgcctcagatttgaaattttctaaatatatttttaaaaatggtccgatgcaaacagctaagagatttagacttctaatgcatattctctccgtgatcatgattatctggtgatgcaacagcttccaaagatggttcatcacaattttttcttgaacgactgctacaaggcttcatgaacagttggttaagtgataaatcattgtcttcccagtctcttcccctcttggatggaatcccaaaccgttcaaatccctgccaaatgcaagttacaaagagatggttcataattttttaagaacatcataaattacacatataatccatagtagaattttaaacacagaaagatataaacatgtctctcacctcgtctttcatgtaactattccacagattatcagtgtatgtgtcatcagctgaagcttcttctaagccagcaaagatgtcgttttccccatgcaataaatatgaacaaaagatccttttcatattctgcaaaaggaaaaggacattcaggaaggttaggacttaggatctagagaaactattttgggaacaaatgcaaaaacctcttatgagttacgaaaggatgagaagatataatcctatccaataatttatcaattacgcaataatggaacaactaaggaatacatatggatccatccatattggtcccgtaccattgtaccgaatattgaaagtggcaacgacgatcgatcgcgtgatatgggccatatggcatgtgtgagtgtgaatataactccgatcatcttatgatgaaaataacatctagcttggtccacagaccacagtccacggtccaccacacacatcatatataaccaaaccaaaccaaattattaagcgttgacatatttatattctttaacaacattattaaagctagctttgtttctttctttcattgcgtttttctttgggtcagtgcgtttaaccgaatgtatatacatagaggaaattattaactacacgagagggataagcctaacaaaaaagttataaaataataatcatgtcacatataataattttaaaaatcgatctaaacaagaaaaaaattgaaaaaactaatggtcggaacataatcagtgagtcgtctcttcatacatcctttatcttcggtcttttgaactgtcactttcgctcgtctcagccacagccggtgaaatttcagtccgtggctggttaaaatcgcggcttgcatgctccctcgtggctcgtcgttcctgctacaatatattctgtgagcaaattaaacgatccacgtacttcaaatgttcattaatacgattataagacttacgtcacgatagaacaagtcttcagcttcaagcatgtgtataatatgacccattttaggtctcttattcgcgtccggatccacacaacgcagcgcgacgagcaacacgcgtttaagagcttttgaagtgggcggttcgggtatttttggatcgactacttcctcagaccttcggtttccaaccattgttttcagccactcaaccaaattcacctaacaaaacgagacaatcaagaacacggttttgtgaaaccttgaagcgatagatataaaacaaattacctctccttgaggtcgactataatcgacaggatttcttccggtgattatctccatgattaatatcccaaaactatagatatcactcttttctgtcaacattccggtgcaagcatactcaggcgcaacatatctacataacaaaccaatcaagacaaaatgtttttcaagaatttgaaatccttaatactatccaacaatcatatttatatatgccaactaaaaacaacttacccaaaagttcccattactcgggttgtcacgtagctgctctcggagaacaagagcttagcaagtccaaaatctgataccttagcattccattgacgatcaagcaaaatattactagattttatgtcccgatgaacgactttcggttcaagaccctcatgcagataggccaatctgcgggaatatcaacaaacaaatcacatatagaaaaagatgaattcacaaatgaaagttatcaaaggcgtctctcggaagtgtaccctttcgccatgcaaagtattatgttcatacgaatatcccaagtcaacggacttttatcaccaacatccccatgaatccattgctccaagttgccattatcgacgtagtcatacacgagcatcctagaggaattccaaaaacgttaagacttatcaaagttcaaaacaagtaccgagcaaagtccgtatcaagcatgcgggtttctttttcttacctgtatgctccttcgacgcagtatcctaatagcctaacgagattcttatgccttacacgcccgatagcttccacttccactctaaactccttctcagcttgaccccttccaacataattaaagactaatgatcatcagcaaagaagttgtccctaatccactaaatcacaagggaccatataatgacacaacaaacaccaccttcccaggaccacattcaagtacaaagaacactaaaatcattcctttcttatctttaccagatagcaaaacaaaagctataatcttctaaattcgaaagaatcaattttgagaattggaaaaatcaagaattgaaaattaaaaatcaaaactttatcaagtacctgttgttaagcagattcttgacagcgactttagttccatcagttaaaatcccactataaacaatcccataacctccttctccgatcacattctcttcacacaatccattagtagctgcttcaagctctctaagagtataccatcttccccaaccaagatgcgaaacctcaggtccaacacaaccactccctgaatacgacgccgtttcactaaccgttcctctgctttcaccactcgagactcgatccgagaacacaacacggtgctcggtcttccctatatccacttgaatctccgccgcaacgggctgcgtcggatggcaatggtcttgcgcaggaggtctaacgatctcctgaatctcctttgaaatcggcggcgttgctacggctgcggatgcgaaatcggcgtgacgtggcttacggtttctccggcgagaggttaaacagagggagagaaagaagagagcgatgactataagagatcctagtaaaattccgatgacgacccaaagctttagaccaaagatcgatgttggtttcgatagctcgttgttgattgaatcaggattgaatatagacatcgtcatagaattgatttggttaaaatgggttttcgaatctttcgcatttgtcgccggaaaagaataaactttccggcgaatcaaaatggatatggataataaaaattcagttaatcactgttgcatgtggctttaggcaaaatgacgaaaaacaaaacagagacagagaagaatcgaacagaaccggaaacaggggattgagtaaaaacaaagacacgaataaacaaattcaatcgaataaattattattctttacaacaacaaaaaaaaattgaaggaatttaaaagaaaagctctctctcagtgttgtgttgtgtctgtgtattttctgatatgagtgtgtgtgcttgggatgagctgtctgattctttctctctccgtgttagtgacggcgagaggtgtggtaaatgacggtattacccttttagttaagaggaaaaatagtgggacctacgtgatcccgagggggtttgtttgtaataaaaacaaacgatgagatgacggagagataacggtgttggggatatgattctctactaatatcattcactaagtacacatttagatccgagttttgattaatgaagctacgtttttagtgtattgctatttaagagctttaatatcattcaaaatagtttttggagaaaaggaatcacttttattataccgaagagactatagactgcattaataacattcgtttgtaaaattaaattattctgcctttgcattttttgaatgaaattttttcctatcaaagggccacatattttgtttatctagataaggatgagaggctagatgaaagttatgtagagtggccagatcagcattccattttgacaaaaaaaagaaagagcgaatatagtagataatatagttttcttcattcttgtattaaataatataatagatcctttatagtttatactaataatttactaaattaggtagaacaaaggctaaagcttaagttgttttaaatttgtatgcgtcaaaagacccatgcccatagtttttatatttataatgtactttgggatcccttgtccatatcgagacgaagagatacaactatgagctaaaatttaaattaatggtttggaaattggaaccatatgaatgatcttttcaccaaagcaaaattttgaaacttataaactttctgatttttataaaccggtgaactaatgaatgatattatacagactaatccagaatttagaagggatgctttaaagggtaatgtaattatgagaatatgataaagaaaaaaggataaggtttgggcgaaaagagaaacccattattgcaccatcatagcaagaaatgtatcattctcataaaaacaattctgccttgttcaataattctgtatcgctgaatcccatgttcaatttagtactacttttacacgattttctaacatgtggtagtaacaccaatcataacctatatcactttcaaaacaagaatgattcatatacgttagattctcctcattttaataaaagaagacgaatcagaaatgatcatatcgaaccgtgcgagtgattccacttttaagaaactcaaaaactagtagtaactaggcaaaacccactgtaaaagtaaaaaacaaacaaaagaggcctctgcctatatggttttacacttttttttgttttgtttcgacctgtcacctaaaagacatcaacccgtacaagagacgagttaagcggacttaatctgtcttcttgtcttctccatcaatggctcgaagcctttcaacaagaggaggatgtgagtagtgataagctgagtacaatggatcagtgttcattgctgataagttctcttcctgcaaaatcccaacaaaaaatccatttaagtgtgtgacacaaattgaggtaacagtttgtgttctgttgttatcttctctgacctgtagtttcactagagcaggacgaagatcttttgcatagccaagcttcacagcaaaagcatcagcctgcaaaaggaacgttaactcagattagtagatgaggctgccattgcaataaagaaactatggttggatcttgagggattgtaagatggtacctgaaactcaaacgctcgactaacgaggttcaggccaaagcttactagatgttgcagtggtattacagtgtgctgtgataatcagacaggagatataaccaaaggtttagagtttttttttcttaatccatccttgattcattagattagtgtcaaaaggcaaaaataacaaacctgaaatatgatcaaaccaatgagaacaggctgtgtatcaaatccgaaactcctgaagagatcagtggagtttctgacaagagtgtatcctccaaattgtaagaaggcaaggatctgcaagcaaaacattgagagagggtcataagacatgatttcttaagtgaaatgtagatgtgagtaagtttttgaactgtcggttgagcctcacttgaactgcaatgaacgagtatgtagtgtgattcagtttccaatgtccaagctcgtgtgcaataaccgccacaatttcatcctcattcttgcactgcacaatagaagattatgttatgtttcagaaccagaaacagaaatgtgagtatagctcgtttgaagcatcaagagtcacagtacctgctgaatcaacgtatcataaagaacaatccttttgttcttaaagaaaccatacatgtaagcctgtatgatgtaacaagatacgtaagcttctaatggtaaactagagtaaagtaggtaggaagagatctcaagcttctcacattgctatggcttgaccttgtagatccatcgacaacaaacagcttcttcaaaggaaactttagagaagaagcaagtttctcaatcttctcccggaggtctccatctggaagctatagccataaaaaagcgggagattatattgtctggtaacaacatatgcaaacaagcagtgaattgtaaaatggccatgacagaaatacacacaggagtgaacttgttgaagagcggtgctatcaagaccgggtatatagtcatcatcactagagacaggataaacatgaatgcccacagatagatggcaagataaggacctcctttctggaaaaagatagaaacttcatgctcagagaagcaaattttaaatttttaacacgaaaactaaaaactttgaagctcacactcaatggagaatagtcatccatgtgaaaaactcagaaataagatgaatccagaatcatcaaacctggactatgaaaattatcgcagcaacaatgggtgggcctagtatgacagagaggaatgttcctttgatcatgtccctaatgaacatccatattgtttgctgtcaacagaatttagaagcaaatttaatccacatctctgataaaaaaacgtaagtcacaaggtagtgttggaaatacgacatactttgttgaacccatgccgagactcgatcacgaaagttgagtacaaagaaaatggcaaatcagtgatctgcatcagaatataaaagaaatattattatcttaagaaaatagatattttgatgctaaacgtataggactatatgaaggggtttatttggaacacctgtgaccatgtcataacaccagccaagaatgaaagagtatgcagtatttcattctctggatcaaggcccaacctcggtaaaacagctccagacatctaaggtaaaaatgaaaactttacaattgtaatgtaacaactctatattcaaaatgagatactgtataccgaaaccagatatgtaccttccaaaaccaaggcaagatcccaaagaacaaaattgcagagtccataagtatagttacaaactcatgaacaaagtgaaaatagctgcatatattaaagttctcagtgatgatatcccctggcaattataaaaaactaaaatgatataaatatgatcaagacgaaaccttttgtcaagactgtatgctcgtgatttctcaaacttctcttggctaattacaccaaccaaggttttcgggagagttggaagcttgagagcagtgagttgcctcagatccaaatacgtctcaaaaatgtacatcactatcataaaacctgtaagaaaaagaataaaacagaagatgaaatacgaatctactctaaatgccacaacaacagatactccatcactgaaaattcaataacatcatctacttttttgatcaaccagatataaaaagatctcttgtgctgactactgatggaaacattggagcactgaaagagttttgatgcaacattcacatacggttccacaacacaaaacccatttcaaaaaactccagaaaactctagttgcagtcacgaacataataataccctgacaagaaaacccaaaacctcaagctgtatgacttgaacaaagaaaaatttcaagattctcaatttccaatcgggaatgaggaaaaaaaagactccgacttttcttcccaaatcctagattttggttaacagagaagctccgtacattctaaaaccgaggaagagatgatgaaatcacataagctcaaatcaaatcaaacgcacgagtaagacaagaaactagtaggagtaataaaacctcagatcaaggtacgcactattagaaaagaacaaaatttagaaacgagaagcagagacgatggtatatgaaacaaacgagtcatggaatctcaacacacacaacacagaaagcaaaacccaaacaaaaacgaaatacgatgagtgaaacaggatagtaaaatgtctcagaaaaaggttttgaagcttacccacgacggtttccatgaaaggaatcgccatggctgagaaaagagtgacctgaaccgcgatgaaagcagaagcaaatcgaagaaagcagaagcaaatcgaagaaagcagaggaacgacaaaagagaggtttttcgtttttgactcttctcaggtcggtgtggatatgtaaaacaacaaaaacacgggtacgggttataccttagaagcccaaatagtaaacgggctgagatttaggcccatatgaaacaacccctatattttatctaaaatctctaagtataatagtatattatcaaatattggggccttagttgaaatattatgttttaaaggggctaaacggaaaactccttatcctcaaactgtcaacaaattacgaaggtgccattgggtttaatcaacaacgaacgccgagagctctcacttcacactttatccacttggagcttcgacaatggcgtctccttcgcttctgcagtcttccgcttcttcgtttcacggacgtttctcaccattagcggctccatcctccgcacgaatgctctctccgccgctcagaaacgtggtgaaagtctcggcgtctggaactgtactggtcgagaaatctgaagccgagaaaactcaacgcctcaaaaccgcttacctcgagaggattatccctgcgctcaaagaagagttcaagtacgttaatattcaccaggtaaccccaaatccttcccctctgagctcaaacctagtttttgttctgttgcgattgattgaagtctaattctcagtgaattcgaattttttgagcgaatgttaaacctaatttgcttttaatgataagtttgaattgatttcttctagaaaatgtagtgaagaagcctagatttaagattgttgtgttgataaaatcgtgctgttgggatgtgccatttacaaatgtgaatgtgaatttgtcaatctcatcattgttgtatatctgcttggacatcttctctaccaggttccaaaggtacagaagattgtagtgaattgtggtattggagatgcggcgcagaacgacaagggtttggaggctgcgatgaaggatatcgcgcttatcacagggcagaaacctattaagacacgagctagagcttccattgctactttcaagatcagggaagatcaacctcttgggattgctgtcactctcagaggagatgtgagctatatttctcttgactaatcaaactttccttttgagttatttatgtattaacattttgtgattttgactgttgtgacaggtaatgtactccttcttggatcgtcttatcaacttagcccttccgagaactcgagatttccaaggtgtgagtcccagtagctttgatgggaacggaaactacagtattggtgtgaaagaccaaggtgtattccctgaaatcaggttagttctattgtatctaccctcaaaatcaaaactactaacttgttatccgctggttcaacaagatcaagcatggtttctctttagtcccactctttgtttacaaccgagcaactaaactctatgttggttggttggtttattacactctaggtttgatgccgttggaaaaacgagaggaatggatgtatgcatcagcacaacggctaaaagcgatcaagaaggacagaaactattggctctaatgggaatgcctttcagggaaggaggtggtggcagcacaggcgcgatagtgcggaagaagaaactaaagtctcatcactttgatgctaaaggaaaaggaaagagatgatgaacatagctgcctattgtatgtatcgtcttctgtaaccaaccatttcatgtttcagaaaaaccatctccttttgtaatgctttatgagtcaatttgaaaataatatcagggatcttgttgttatggtaaaaatttatcaaggtttttctgtaatttattgaaagttttgtggattatacaaaatgtagcgcgtgagtgaacgtgaaaagctagcgcgtggatttgtcaattttaccttcccctttgagagaaatcgctcttctttgtaagacttggtttcgatcttctctttttcatcatcaatcgatcaaaacaaacagcaacagcaaaattatctttctgcagatcgaaaccctaattggtttctccgttctccttttgttcttctagaatcggcgactcttacttttttttctttctaattatccttttctgatggattctggaatccatgtaattccccattagcgctaaaaaccctagctgtcgaagaccttagattactgcagaaatgttataatctgttttcatcttttcccgatttgaggtttttatttattttggttgggtgagagaatccgatacgagagattaaagccttgtgagtttaggatgagctagttttctttggctttgagctgtaatttctcttctctgaaatctttcactgtacatatagctagatcctgatgaagttgcgtggtggtgaatcgtggtttaagttttgctagttgagatattattggtggttactgtaatatcgaagaatcatatttcacggtatttactatagacaactactgtagagttacttgattaaggcgttaagaagagatactggtgttttttggcctcaatcagctaagatttttgtgcattgtatgatgagtatagcaaatgaacaacaatttgccatggatcaacttgtcgaaaccaatgatgattcggaaaagtatgttttttctgttttttgtaaaatccatgtctctgttttgctgcttattgtacatttctcagctgcagttgcaattgttttcaggaaaccaagaattacatacacgaggaagtttcttatatccttgagcgagaaagacgtttgcaagaagctgccaaatctgcctggtgaatttgatgaagcactgttgctgtgagactctatccgatagttttttttttagtttggatttctagaaactgtgtaaatgtgtttgatcatgttggagtgacatgtcttgatttgtacactctttatttgagtagtgacttcgaagatccttcacccgagcgagcaagaatttcaggcgatttttcgtcgcatggtttcaggcggaatgactatagttcatcgcctcccaccaggggggaattaggtactaactctcgaggcacccatggaagatgggaagggcgctctggtggatggaatgataaagatagtgattcacagtcagaccgggactcaggtagccggagcttactcgtatcctattctttacatgctgtatgatgacgttactacagtaacaaggtggactagtattctgaatagttaccttgttgttatatatgacctataaaatactcctacgaattatgtctttctgcaaaaaagtgttcattattatgatttcaactctatccatctggctgttcaatatgcgtaaatgtagatttccacctttttttaactaaagtgaatggcatgaagtctgcttgtctagtgaacatgaaaagaaggtcttttcgaaaaattctggaatttgggtgtattatagttgatttggaactgtgtattttgttaggagagcctggaaggcgttctggtatgccatctcggaggtcttggcaagcacctgagcatgatggacttcttgggaaaggttctttccctaagccttctggatttggtgcgggaacatctgcccctagacctcaatctaatgactcacatcagctgagtagaaccaatgaaccttaccatcctcctcgcccatacaaggttaagtacccaaatatctgctgtagtcatcttgaatagtctctggtaccattgattcttgaatactgctccatcacgttactgggtttcatcagctggtttgtgaggtgtatttgaatgatttaacggcatagattcataaatctctcatgtacatttgtaggcgccacctttcactagacgtgacgctagagattcattcaatgatgaaacatttggttcttctgattctactagtgaagatagagcagaagaagaaagaaaaagaagaggtacagaggatctattgactttgatctgtactaaacttagctctctgccaatttgtgcacttctttcagttaatccatgcgtttctttttgtgtcaatctttaattgacattctcaactctctgtcagcttcttttgagttgttgaggaaggaacatcaaaaagcattccaggagagacaaaaatcaaacccagacttacgcaaaaacgactttgattttactgaacttcttggggagtccaaagatgataaagggcgtccaagtagaagtgatgaagtcaatcacgctccaacaattcctggttctagtaacacctctttgccttctcaaagtaatgcacccagaccgcttgtacctcctggttttgcaagcacaattttggaaaaaaagcaaggggaaaaacctcaagtaagtcgctatctttctgagaccctcatccatacctaatatctgtgttccatgaaggtttcatttttgtttgcatattgattgttaaagtcttaaggatagcaaaatcccagaagaaatatcaaaatagaggggctttatgataatagttggaaaggggaatatgttacaagaactatgcaaatcctgatagaatgattctctgcaattcatgacagtaaagtcaaaaggaaaagcgcacgcctagttcttctgactagtgacaagctttgaacatactttttttattctatcttatagaaggcaagtcgtgccgagtaagagaatttgggaatagaggaaataaattttattgccttgaatatcaagtaaactaggaaaatataaataaagccaattccttcaataactccgtcattgggtgtaagtgatccaaggctgtggtctctttatctaccacttccattcgcttactgcagatcagtgagggttgaaatttgagtgtggtggcttttgttttaatttatcttttcttcgtaaatgttttgtttgaatgtatgctgtgtttgaatgtatctttggtggcgcctattatttactggttatcacaccatatgcagactgaaacttctcaatatgagcggagtcctttaaattccaaaggcattaatgtggtgaatggaacatcagttaataatgggggaaaaccgttgggaattaagataggttcaagtgagatgctaatagaaggtgaagatgttcgtgtctcctccactgatgcaaatgaacgggctgttaatatctcttcacttctaggaatatctacagatacagttaataaggataaaagttttgaaaagctttcctcgatctcgactcctactgaaattcaggggtatcctataaaaagtgagaaagctacaatgacgctgggcaagaagaaaagcttggagcattcagatgggccatcaattctggataagatattcaacacggctataaatttgaatagtggtgactcctctaatatgaataaggtgagttttttctaatgttatgtatccctggaacttaaaattctactcacatgatagctcttcaatttttgcttaatcctcataaatctattatcgatatgcacttcatttttggtccaaatgatacatctctctttctgatgtggtttcctctggccagtcgtagatgaggcgtttttcctatattttgtattgatcatgaaaaatgatggattacatagtttgtcttttctcttagtaagcaaatggttgtccatgtgttatataaaccaaattgaatgcttcgtcctgaggaaacgacttgtttgggaaatgatagggtacacatgtttatacatgtccatgtacatgcatcatatattccctgtggaatttgaaaaatctcatttgacctgacatttgtccacatccttatagaaaaatgtcgaaaaagtagaagaaatacgaagccctcagaccattaataaatcctccaagttcgctcatctatttcttgaagaaggtaatccatttactgttatactagtagaattgtaactttttcgttctaacattctttttgttgcagataacaaaccagtcgaagttctcccatccagcgagccaccaagaggcttactgtcactacttcaaggtgcagataaattgcaaacatttgacacaaaagcaaatcccgacctttcaacggattttccttttcaaggccatgccactaaaagaactgatcagttaagcagcacttccacaactaaatcagtaacagctgttccacctgttctcacttgtgaagaccttgagcagtctattctgtcagaagtcggtgacagctatcatccacctccaccgccagttgaccaagacacgagtgttccttcagtaaaaatgaccaaacaacggaaaacatctgttgatgaccaggcttcgcagcaccttctttctttattacagagaagttcagacccaaaaagtcaagatacgcagctactttcagctacagagaggagaccaccaccaccatctatgaaaacaactacaccaccaccatctgtgaaatcaactacagctggagaagcagatccagggaagtctttgactcttgagaatttatttgggagtgccttcatgaacgaactgcagtcgattggagaacctgtctctggaagagctatggtttctgatgctccaggggtcccgcttcgatcagaaaggtcaattggtgaactgagccaaagaaaccaaatcagacctgacggtccccccggaggggtactagcccttccagaagatggtaacttacttgcagttggcggtcatgcaaacccatcaaaatacatgtcttttccaggatctcataatcaagagcctgaagtagctttcaacatctctgacaagttagctgccttgaactctggtccaaggaacgaaagaccaacaatgggtggtcaagatggtctttttctccaccaacatccccaacaatacgtgaccaacccctcgtctcacttgaatggttcaggcccagtattccatccgttcgattcacaacatgctcatgtaaaacctcagctcgatttcatgggaccaggaagcactatgtctcaacatcatgaccctccaccaaatcaccggtttccaccaaacatgattcaccgtccacctttccatcatacaccaaccagtggacatcccgagtttgatcgtcttcctccacatatgatgcagaagatgcatatgcaagacaacctgcaacatcatcatctaatgcaaggattccccggtagtggtccacaaccccatcactctcctcatgtaaacaaccagatgccgggtctcattcctgagttaaacccgtcacaaggctttccctttgcccatcgccagcccaactacggtatgccaccaccaggtataacataactgaacatatgactttcactcattttgggcctcagatcaagatcttgtttggacttgagtcggctgctctagggagccaggtattaatatcggctaatgtagggactagttgattctgagtttgctctttgttttctttggctttttaaggttctcaagtcaacagaggagagcatccagcttcactgcagacactcttggggattcagcagaggatggacccagccaaacagataccggcagtgggtcaagccggtggtcctaatcgtcaaggctctgtgggtcatgaactcgaccttgggtttggctacaggtaactttgctctggccacaatcctttttaacaccctaagaggtgtgtctacctaacagtgagttgctttgtgatgtgcaagtaatcaaaattaccatttgtgatattttttttaagaacaaaaaaaaaaagaaaaaaaaaatatatactttgtctctatggactctcgtttctcttggtgcttgtgatatggggatgcttttaattaacagtagttgattttcttctatgaacgctggagtccctggtatttgcatattctattttaggctttttggttttttgaaaccagagttcaagtctgaaggggtctctgtcgaaaggtaacacagatggcgtgtggtaacaaagttaacaaaatcttgcaattttgcatcggcccataaagcccaacaaatatttagcctaacgtgtcgtcttctttctttaaacgccgggatccgtaaaccctacgttagtccatctgtatcaatgaaaagcaagagaaagccgacgaagaagaagaagacgccgacgccgcaatgaacattaattccgtcgcttcctatactgaaaacaccagagctttgcaagttcaggtcactcttgggacacacggagagttgtctttatgtttgcttcaaactgagagcttatgagaaccatagctgattcaccctctgccggaaacctgatcaaaccctaaccaatgatgaggttgagtggaaagttgtgaaattagggggaaagttgagtggtttgatcatgtgcttacagtccctagacattgtaattttgtgaatgctcttgctgctactgtttgatttaagtgtgagtcacaaaaaggctcgaacgtgtatgttttccttggagatggaacactcaatgtggaatgcaacagttaatcaggcggaataaggcgactcaagtgattattctttatacattcatattttttgagtatacaattattcaaaactaaacttgtaaccttaccttttcttcaaccgtgttatcactaactggatgtgcacttcaaaactcttctgctgaccgccaaaccaatattacacagtctctttggacactcactctcagggttttaatcttaagattgatccaaactcacttgcagctaactgtgaccttactctgcaaaaccttgtattatctatacacacatacacaagacaggacaaacacgtgtgctccaccgcgacttacagagacataaaaaccacaactcagtagccatctaagagtctttgcgattggttctgctcctgtagtgagaacacgaggcctaaatccaagcaatgcatacagaccttggatgattgtctcttgatctcacataaggtacattattgttttattctatctctatttcaaagctttagcgctgtatgatgatatcaacctcctctacatatcaaagcaccaaattaataattacgaaattacttgatatccaccaagaaagtattaatctttcagtatttcattgagagtgggaatgagattactacttacttgctctgcaaactcgggacttgtcagatttacagacaggttttgcatcagtaaaagaacctgatgtatcaaaaagaaacaatatcaaagaagcttctttattatcatcaggattgaatttttcaacaaaggctcagagtagggactgagtctgattaaacgtgtctcataccgtttccatatttattggatccatctgctttaatctctggaggtggcctgatgtgttgggatcgaagacacttccaatgaagctgtaaacttcagcaaaattcggcatcactgcattaaaacagctccattgtcagcgtaaatctcaaagatgtctactagaaaaacacataatgtaacaagataacaagtcttacctctatgtggcttttcacaactttcttcgttatttggctttgtcactgctcgtaccctctctgtatcttcctgtctgcagcgattatttgggagaggagccgtggccgagactcccggttcctctactatcacaaattcattacaccccattgttaacacgattcacaaatacaactaactcaaaatctcatcaactgaaagcataaccactagtaaaacctaccttcaatcaccggttttggcagatttgtcgattcatgattccacgaagaagaggtagatgcacaaacagcctggtttcccatcaatgacttcgaatcagagctatacaaataaccaggctcaagcaacggtaatgtactcgaagacgggagagaggtataagcaactgcagcagcataacaaatcattagaaaatgattaaagcaaagaagaaaacagagtaagaagatgatcaaaagtcaccatttttaggagcctttataggataaggatgactcgctttcctcttaggtcgaggaggtggaagatgttcgttagcaccactcttctgaactttgagaaagtatttctgagcgtggcttcgtatctgccattattactcttaaacatcatcaacacacaatcattttcaaaaacaatacagagaataatagtaagatggtcttcaaattaaacctgaactactgtttttgatccaacaaaggcttctattttcttccaatccctatcgaatctgtaatcaaacgaaaacaatcaaatctcgaaacttgtgaaattttcttaaacgaaacacacaattgagtgacaattacacgtacaagtgaagagcttctagaaatttatcgtgctcttgatctgtccaattctctctcgacttcttgattgtgtacggcttccgaatcttcgtcgtcggatcctcagaaaacgacaccgtactggtccgtcccgtggccggaatcgaaccaaatccatcggagcttggtaaactcatattcgaggaatcgaaaactggaaaacccttaggtctagggtttacggacaccatagagctcgaaatcgcgattcttcttcttcaaaggtcctttcactgtcaaaagattttgacttcgccagtttttttttgtggctgaagaacagaggggtagaattgtaatttcaggagcataatattgtttcctttacacgtgttagggtctcgttgctctagtacccagactataccactgacgccttaaactagtgttatcacttaaaccaagaatcaacggctataaagatgtccgcgtggagacgatctcgaggacggagaagctctcacgttttggctagtaactactaatttttgtttatcactaatccactatttaaatagtagtattaatcttcattctttaactacaagtgtttactagccccaacaaaaagttacattgtcgaaaatttagcgattagtttttccgaaatagtgttctatctgaagacaaccttgagaggacgagccacttgttttagttccaagcttgaatctcttaccacttcctgagcttgcattggttttctatgcacagatatcaacacattaggcaaggtagtggaaattaatgagaggagaaactgaagaagaatgtaaaactcacagaaatttggggtttagatctcagcactttgattctaccacctttaccatcaggtccaatagagatgagatcatcttttcttggaacagaacctcctagtgatggagttgcttcgtttctctctccatgtttgctccatctaccaaggtttctatttgttccacttgactgccaaatgtttccactacctgcattggacaatcttcaatctactactacactcaagaacttgaattcatgatgtacaacaaaagtaccattgctgtaaggtgacactgatgatgtcgggtcttttctgatgttgaactttatatccttcaccatggaattatcacctttctcttcaatattagtattccaatctctaatgccagaagtgttggtttcaggaacataatcatcatctacatctataaccgagtctgttctgctaacgaaggagtcttctcttccccttaagcatgatccttgaatggtaaagccatccttttcttctaatttaccaggtggtgtggagattttctccactttgttgtctgatgaaagcattctgaaagaagacatgctctcgattgcaggctcggaaacttctgtgtaactgcatttctttgaaacgtttatgtcccgtagagctctgttctctctctcttcagttatcaactcaagttccctcattcgtttctggtcatagaataaacataataagagccagatatagaagacacaaagaagatcgagataaacaccaaaacacacacctttagtttttctatcttttccaaagctttttcaagtttctcagaagatcgtgcttcgcctcttcccagctgattgcacttggctagcaattccttataactcctgtcagagtaagaaagattgttttttattagagacttcataaaagaaaattcaaagacctaagagaaaagaaacgcaatgttcaatcctcctttcctcaaattcttgaccatacctacttatgaaatttcgtaatttcagtttaacaagttgttgttacgaatgaactaaggtaaatcaccatttcataagtcactgaaggtcaaattaatcttttttaatcggattacactgctgtagacatgacaaatgggaaataatgaaccaagttcactaagtcaatgaccaaaatgagagcagggaaggagtgacaactaagtgctaagcacctacctatatcaaataaccaaaactaagtgaagccatgtgaactgagtggaactaatctatgtgacaaacctattccgaataaccaaggacttgactagtgtgtctattgtatctttcgtcttcgcgttattccccaacaaggccaacttcagtacatcatcttcctccaagcttaaatcagaaaccctggatgcaaaacaagatattagactcagaaaaggtttaaccatacgagtgaatgattaaattagaacctgaagacactaaaagagcaatatgaaagatgttatcttacaatttaagcgatgcgagctccttggcaagagccacagttctctcctgtagcttaacacactgtgagttaagctggatacattcctgtaacaaacaaacacactaagaaactcaacacaaaattctgcctgtgaagcaaaaaggatctaaaatctaaggatgttgtatagtttaaacaaacctcagattttaacttaagcaaatgctgagtcgttgatatttcttgaagagcctcccaccttttcactttatcctccttcaattgctcattgcattgatgcaactgagacacacacaaacaaaaacaaaaaaaaaaaaaatcacataaccttatcttatcttataaaccattctaatcaaacgaaatgaacaaaattaaccttatcagagacttcaacattctcctttttcttcgcctccagagccgaagtaagattctgtaccttcccttcaagccgcttcacttctcctctcaacaaaaccggatcttcttcgattccaacaaccttatccgaggcaatcgaatcggtttgattcccagaagactgaaagtaaagtcgacaaggatcctttagagagcacttctgcttacaaatcggacaatttcgcttgttcgtactcgggcaatactcaaaccattgctgcaaactagggtttccgaaagaaatcgattaaacacataaatctataaaatttcggagataataaacttcattagagaattgattttgccgtactaaccaaagttcgtgaaagacatggccacaagcggagattgattgcagattctcaaccaccggtttaagatcttcgtagcagattgaacaaattgcattccccgccgcgttttcttcggccatagctatctctccggcaatcaccgactagtcagtttccgacacagtcaccattttcttctcgagaaaatcaaaaggcaaatatcagagagcaaacacatggcgcggataaaaagttgaaatttcaatggtaagcgcgaaaatctggggaaggatagcacgtgtaagtcacgtgagataaaaacataaacaaccagtggcttgtattaggcccaacgtttttaccctataggtccattaaagcccaaatcagctattgatcagtggtcaaacacaatgtttaaattaatgttgacttaactcgtttttagtaatactagtacatcttttcgcatgcactaattaactcactctcgagagtagcgttcgtgagtctcgaggtttctcactattttttcttccgcagcgtcaccgactcagatttggtggtgctaggtcaccgtgttcttcacggcgttcgggagaatgtcttagttaccccagcttctccctaaggaaactccactactgttcaaaatccctttcctacacatctgtagttaaatgtcacataatctgttgaattacttgaggcttaaggtgtaaatgttatttttccttggcagagacctaaggtttatgtgtgtcttccagtttaaattatgtgtgggtgactcagagaatggggactaatgggaaagagattccttgtgagactcagtttctaatcgtagaagcaaacaaaggttctggtttaggaggaggagatgaatcgtcttcctacgttgtattcttgcctatacttgaaggagattttagagctgtttttcaagggaacgaggctaatgagctagagatttgtcttgaaagtggtaaattgacacagctagctagatttgagttgaaactttttgttagattctctctgagatttatatggtttgtgtatggtcaaggtgatccaaccgttgaccaattcgagaggagtcatttggtttttgtggctgctggctctgagtatatataacgtttctcaaatctcaacttaagacttctttatgtccaaaatttttttagtgctaagaatctttgcctttcaatgattatgcagggcttttgaacaacattttcacaccgagagagaaagaaagtaaggaaacactgagacgttttatgtgatactttgatttatatacataccaaaaactaactttgaaaatttcccctgttttggttgtgttcagatgccagatatgttgaactggtttggttggtgcacttgggatgcattctatagaaaggtcttgagaggtactcctgagtctttatttttaaagatggctttaacgtttagattgtgacttaaccaaacctgcaataattctctgtagcctcaaagctggtgtggttactccaaagtttgtcataattgatgatggatggcaatctgttggcatggatgagaccagtgtagaattcaacgctgatagtgctgccaagtaagtaatgaagctctctgttcagatataagctctttctttaagctaataaaccactcttttatctttttgtgaattccttcagtttcgcaaaccggttaactcacataaaggagaaacacaagtttcaaaaggacggcaaagaaggccaccgggtggatgaccctgcattgagtcttggacatgttatcacagatattaagagtaacaattcactcaaatatgtttatgtttggcatgcgataaccggatattggggaggagtcaaaccaagtgtttctggtatggagcactacgaatcaaaggtggcgtatccagtttcttaaccaggaattatgtccaatgagaattgtggatgcctagaaagtataactaagaatggacttggtggaggcgtcaaacttgcaaagaagtatcaccaggctttggaagcttctatttcaagaaacttccctgccaatggtattatcgcttgcatgagtcataacacagatggtctctacaggtaagcatcgagacctacaatattgttctcactgttaatcaagaatcattgtaatcccttctgatctcttcttgtaatgatacttagcgcaaaaaagacagctgttctggcatagagatccggcttcacacacgatccacattgcttctgttgcatataacacacttttccttggagagtttatgcagccggactgggacatgtttcatatacgttaaattgattcaacatcaacaaaatttctgaacttgtgaatgaatctatttgtttctcactgcagagtttgcacgcagcagctcgagcagttggaggatgtgccatttatgtcaagtaatcataaggttcactaacattttacaaccaaagtatcatagtaaattgagctgcaagttaataaactctagacattgaaacttgttaaacagcgacaaaccgggacaacatgacttcaaccttttaagaaagctagtacttcaagacggttccatactctgaggaaagcttcccggaagaccaaacattatttgtttttgttcaagcaataattagtttcctcgtcacttgtacaatgagccgtaatagttgctttctcaagaaaaagtaaaattgagtattggaaaacagagttgatgtctgcagcatttataacttggaaaatgtaatatttttaaacggctatgattaagtatctcttgaccttcctcaagagaaaacaactattaaaccagttataaatactcgcacttagttaatcgccactctcatttcacaaacaaactttttaaaacctcaaaaccaaatcgatatagtctttagattgacaatggcaccaaagcagttgaaaaaaatcgagaatccagtagtgtcttcatctgaagaagaagagtctgcttcttctggcgagtctgctacttcaggtgaagagtctgactcttccgccgattcacccgtcaaagagtcttccaagaagccggtggttgtgagcaagccttctggttccaagactactaccaaaccggaaagctctactgctgccaagagatcgtttgagaaaacagacgaaatgagtaagaagaaatcgaagaactcaatgggtgaggaggatgtgaagaagaaggatgaaacgctaaagaagaatctgtttgttaggttattcaccgaagaagacgaagctattttgctccaaggcttccttgatttcgctactaagaaagaaaaccctagtgatcatatcgatgatttttatgagtctatcaagaactccatcagttttgatgttaccaaacctcaactggtaaccaaaattggaaacttgaagaaaaaattcaatggcagagtttcgaagggtcttaaaaaaggaaagaatgaagaagtgatggtgttttcgaaagcttccgaccaaaattgttttgacttgtcgagaaagatttggggaagtaacggtgtattgtattcgaaatcaaagaatatgcgacaagtacagcttggaggaagtgtcaaggttgatgaagatgatcaagagccacagaaacatcggtttgtcataagcactttatcttctggtcaagagttggtctcttacttgaaggttgagaatccgaattctttgggtgttgatgacacaaaatggagtgcaaaattggataagatcaaagacggaaaacaaaagagaaagatggaaaaaaacttgaagaagattcaggctaaggaagaggagctctctatgatgagaagtgaatttgttgctgccgtgacgaatgtgctgtctaagcaagacaacgcatcttattcctgtaagtagatgaaagggctagctggtggtttgttgttggcttgtttttcttatccttttttagtttgctttttgcattttgcggctttagtttcttatcggtggtttggcttcttaagacttttgttctatcagataattattctgtttgcttctattgttggatgctttgattgggtataagaccccttcgtttatgttaagtggtaatttatgttattgatgtcttggaatggcgtttcaaaacatgtttcagtagaatactttctgttctattcaaccaatacattgggaaataactttggaaagaggcaaaaactcatcacttagttttgaagtttacttataattagagacgataacctttcaaaaataattagagatgactcctacacacacacccctaaccaaatgtttttatagagaacttgaattcatgatgtacaacaaaagtaccattgctgtaaggtgacattgacgatgtcgggtcttttaagggaaacttctgtgtaactgcatttctttgaaacgtttatgtcccgtatagctctgttctcttcagttatcaactcaagttccctcattcgtttctggtcatagaataaacataataagagccagatatagaagacacaaagaagatcgagagaaacaccaaaacacacacctttagtttttctatcttttccaaagctttttcaagtttctcagaagattgtgcttcgcctctacccagctgattgcacttggctagcaattccttataactcctgtcagagtaagaaagattgttttgtattagagacttcataaaagaaaattcaaagacctaaaagaaaagaaacgcaatgttcaatcctctcttcctcaacttcttcaccattgcttacgaaattgcgtagtttaacaagttgttgtaagagactagaaaccgaacaaagtactctactctgcaggaataacaagatgaactaaggtgaatcaccatcttcataggtcacttgaaggtcaaattaattttgtttaatcggattacattgcttcagacatgacaaatgtgaaataatgaaccaagttcacaagtcaatgaccaaaatgggaccagggaagcagtgacaactagttgctatgtacctacatattctagataaccaaaactatgtgaagctatgtgaactgagtggaactaagctgtgtggcaagcctattcgggataaccaaaaatgagatcagggaagcagtggcgaacctatttcagataaccaggacttgaccagtgtgtctattgtatctttcgtcttagcgttattccccaacaaggggagaaaagttgaaatttcaatggtaagcgcgaaaatttggggaaggaaagcacgtgtaagtcacgtgagataaaaacatatacaaccttagtggcttgtattaggcccaacgtttttacctaacggcccattaaagcccaatccagatataaaggaaagcacttgtaaaaagtcacgtgagaataacattttcaaccacagtggcttgtattggcccaacgtttttttcactaacggcccaaaaagcccaaatcagctattgattagtggaggagtactcatttattaattcctcctactaattggggtttaccaacttaacagaaaaaatgcatcagttgtgtgagttgtcgaacaatcaaagtgatttaccaacaaaatataaataaaagtaatcattaacttgattagatataaaattaaaaaaaaatcggttagtcaaacacaatgtttaaattaatgttgacttaactcgtttttagtaatattgtatgtatctttataataataaaagaatgcttgggtttgggtccacgcgtttttgtgatacaatgcctcgtgcaggccacttggagctaaatattttttttgctaaaaaaactcgtcctcgaaggtttcacgtggctcatgcacccctgactgggtcaggagaatcttgaccgttggatcaaagttgaagcatttataatagctttgaccgtccgatgaatgactacaaagattgtgattcgttataagccgtacgattgactaacacaaagaggaatcaacatcacgaggcgagagataatggtaacaacggcataaaagcatttttctcgacagctgtagcaaactccacgtcatcttatcttactcgccgtgtgaaccgttgattttatgaaaatttgtcaaccttttttactcgcggagatcacgcgctcccctcgtttggcacgtgtgtcacactctgcttcactcgtaaaattctttttccttttcttctttcttattgttcaccatataaattattttgaaccaattttttttttacaatacaaattgtttttaaatttctatacaaattatatattatttttatatttatgattattacataataattagttaaattttttcaaaataaatattcttaaatctgcgtgtttttagttaaaataatttatattgtgaaacggaaagaataatattttttccgaaaataaaatgtttagtaaatttgtgtgtttatttcaaaaattatgttattgtttttcttttttttaaatgagttgtagaatgggaagaactaaataaacacactactcatattattattttttataacattacctacatgtgctttgctgttgctattctcaaaaggtaatgaatggtacaatagtatcccatgtttagagtatgtggcagagtgatcaacactatggtgctaagtgacaatcactatctttctatctacatactttttatattgcatttaagcacattttttggaaaaatataaaatggaatacatatgtgttatccatgaatggttctttttttataaacatcagttgttagattgactattttgtaatgtcgaaagctcacaacaaattaaacttttattcttatcccttaacattataattttttttgtctaaattaatcttgacaacttccaattccataatcgttggtgtaaaaagatttaagaattgtttacttcatcttgtgcgcatcgataaaaagtgggcactagtacgaaagtatggtttcccactatttaaaatcaaatcaaaggatccctaaaagcgcgtgtgagagacgcgtggaaatgtccaaaggagtgtgaggttgacaaaagatgaattaagagattattcaaagcctttgacattttatcaaagtcaaccaaatacaagaaaccggaaaccataagtggttttagtcactaggcgacaaagacaggataagcatcgagataccttcttcaagcacatacttttctctctttctagaattgcccaaaaaagccaaagagactattcctctctctatatatatatagaatataaaatattctaatatacgtattatataatcggcatatacacgtattgtgattccgacagtgctcatctttttccaagtgtgttcatacttatttgcttttaaaacaagatacagagatatgtttaatttagtaatgtctaaacaattgctatcactaaaaggaaaatatgtcaaataaacactaacatttagtaaaattgtaacgataggttggcacaataatggcatcggtttatagaggacgattcctattagtttgctaattacaacatctagtattagttttgtgcaatcgtcacatgtccttcttcatttcctgttttatatacaaaaattattcagtatgtttacaccatccgtacacaaattttatttttagttaaatatattttatagtcacaagttgtgtgactcaacaaaatattttcaggtctttttttgtaattcataaattcatgtctattaatattttcaactaataaactaatttttgcgagataaactttgaatggttacagcgatccaagcggacaaaccatctacaaaccgaaccgctttttatttatcattcacaatctatagttcgtaatgaagcagaaccaaaaaaacaaataaatttgatgcggattgactttaaactaagtttgcagcggtttgttctctgtcctaaaaaatagtatagattggaccgttgacggattagttcgcactaaccacaacatatccgtctcaaaaaatagtatagactgtactgctgacggattattccggattaaccacaatatccattcaaaacaataagttgatatgtggaataattacaatgtaacaaaaagagagaagaaaacaaaattgtatattatactgtatttgaatcataaataataatttaataaaatctttcctccatttttttcaaccctttttttattttcgtccatcttcagtctctttataaacatatctctctacccttcaaaagtcagcgctctcttttgtctcctctgcttttttctcttctctcctcagagattcgaagctttttgtctcccctgagtaaccaaattcaatggccgacgattgggatctccacgccgtagtcagaggctgctcagccgtaagctcatcagctactaccaccgtatattcccccggcgtttcatctcacacaaaccctatattcaccgtcggacgacaaagtaatgccgtctccttcggagagattcgagatctctacacaccgttcacacaagaatctgtcgtctcttcgttttcttgtataaactacccagaagaacctagaaagccacagaaccagaaacgtcctctttctctctctgcttcttccggtagcgtcactagcaaacccagtggctccaatacctctagatctaaaagaaggttcgtttcttcacccaattttcgataaagtttaaaccttttgtcaaacccatcaacaagtttacgaaattctgttgaattaatcaaaattccgaattttgctgtatagaaatggttaaaagtctcaatttttgtcgaacccatcaaatttgattgaatcaagaaggctaaaataaaaagtctctgtttttatttggttgcttgttacagaaagatacagcataagaaagtgtgccatgtagcagcagaagctttaaactccgatgtctgggcatggcgaaagtacggacagaaacccatcaaaggttcaccatatccaaggtaaaaccaaaaaaattaccagaaaaaaaaaagtcatttattgagttataaatgtgtgtattctttcaagacaaaagaaacttgtctgtttttgtgattctgtctgattttggtttgttaaattattatctgcgttacatttttggtaaaggattctaattaattctcattttcatgaaaacagaggatactacagatgtagtacatcaaaaggttgtttagcccgtaaacaagtggagcgaaatagatccgacccgaagatgtttatcgtcacttacacggcggagcataatcatccagctccgacacaccgtaattctctcgccggaagcacacgtcagaaaccatccgatcaacagacgagtaaatctccgacgaccactattgctacttattcatcgtctccggtgacttcagccgacgaatttgttttgcctgttgaggatcatctagcggtgggagatcttgacggagaagaagatctgttatctttgtcggatacggtggttagcgatgatttcttcgatgggttagaggaattcgcagccggagatagcttttccgggaactcggctccggcgagttttgatctctcttgggttgtgaacagtgccgccactaccaccggaggaatatgattagattacgacggcttagaatactcttattaggacagatttataggattaaggaattattctcggagcatatgtaaaaataggataaaagaaaatgttctttgttactttttttcgggttttcttcctattgtttctaaacatcttagaaaaaatttaattgtatattccttaagctcgatacatcttgtttaactcgagtacgatttacttatggagttatggtctttgtctcatcattgcatagaacttgtttcatccttgctcgagtactcactgatttacttgtggtatttatctcattgcgttaaacttgtttcataactttaaacacaatagtctgacgcgactaggcaagtgcacgtctcaagtgggatctaagagatttctaggtaaccaccatagcatatatacataagataatattagaaactaattatagaattaaaaaaaaaaaaaactaaccattatcagtttttatgtgaataaataatcatatgactatataaaaaatacaaaaatgtctttacaacttaaatcgaaagcaagtttatgagaataacaagatatttatcaaaaaatgatatttttctaatatgttatgataataaatgatctgttatatgaaaaagtagtatgttgacagaaagagattttcagttatcacgtgtaatttaaaaaaataacgtggttaaaaaaaataacatacaatttaaaaagaaaacataacgacggagattccaaaaaaaatcaaaatcgaacaaaataaaatgagaaatcttctacaaattaagggagaaataatctatcaatataaataacgtttggcagcctacatttatcgaaaaagagatctggtggttgtgatggtggaagatgtggtggttgtggtggtggaagaaagagagatgagtggtagtttgtttcggattcgtcggaagtttttcgccatagaatcatctaagtgttttgtgtaattttggaaaataacgtgtaatatatataaagttcgaaatgggtataaaagtaattgcaagtgaagaaatagagtgtactgtaacagcatggctagtttgttaattcttttacaatctatggttattttgtgcatattcttataaaaatactaggaaatgtctcacgcgttgcgtgggtttgtaaataatttaataatatataaaaatattttatgactaaataaacattaatggaataatataaaatacactaacggtaagaaaaagcaatacccaattttaattaaagagtaagtctttttattagattaaaatgacactataaaataagctgtatttgtttcttttgtatccactattagaatcttttgtatttaagtataaattttagatatttaatttttattttaaatgatcacaaaagtttgtaggaaaaatttcttttaaagaaatatttgggaaaaataatgatatataattaaaactattgaaaataaataatagtgtatttaagttgagagaggacacatgtcacaaggagagatgtcacgtgtcagcttctcgtagctcttgaataggagaaacctttatttattatataagatgtatataaaattgattgtgtaagattttttttttcttttctaaatattaaattaaatataaaaatgtgtgtgagttaatatttagaatttaaatagtatcaataatattaagtgtgtagaatcaaaataaaataataaaatagattgcaaaagactagagttttgtttaaataaaaaattattaaattaaatatcaagaaaaatgtttgaattactgtactgtcgagaaaagataataataatatatatatcttacattgtatatttaggcggtacttatctagtatacatattatagattttattattaattcattttttgttggaattttattttaccatattttgtgggttttcagcttttaatttaataaaattatattcactaaaaaaatacgtttgtacaaaattgtcactgagactatgatttggggtgaaaagctgtagagttggagggtgaggccactcaagatgtgaagggtgcagaggctgatttccagagagcactgcagtcttccctttttgattctcatcagaaactaatttggaggaactctgggatcaacttcattatgcgataagagcattgaaagctttaagattcgataataccatgcgacagaaagccatagataaattgatagccttacaggagaaagaatccattgcgtccaatgaagaatgcatagctagagaagttgttcaagaggctactttggaattatctttgggtgaagcgaggttgcagcaggttctagtggagtcagcgggtcacaatgcttctgaggttgaggataaagtctgggagactatgattttgggtgaaaaagctgtagaattagagcgtgataccactcaagacgtgtaagatgcaaaaacttcttttcagattgcactgcagtctactcttttttattctcaggcccaaggacaggttttggttgggaaaagtacagttgttgacgaggatgcaatatcgagtggcgtggctgaaaatgagttagcagtagatgaaatctacacttgtgaggcaagcttttctatgaaaaagaaaaaacctataattgttgttataatcttgtttatgatgtttgtctctgacttgtttagatttgcaccggttgagtctctcgagctcgccaaaccctgtttcccatctccaagttactttatgttgtgtgttctacaaaatcgttgagaataattcattggattctatagtttgagactgaactctgatcttttgaatctcctggaacttaatggtttcgatgcaaaagattgaggcctctattcttcaaagcctaatccttgagtcccctatggcagcgcttatattattttgtgtatttccatgctactctgtagattccactttcttgtttgatgatcaagatttctgctttgatttcaggaattacttaacagatctggtgcaagaactttggaaccaaggacgatgacgaaagagagcactaaagttgatctatagttttcactttcctagtacagtactgtgtgagtgtgagtggattgatgatgtacagcagctgacattttccctctgtaatttctctaatatacagcagctgatatttccactataaattatgggatgtgtatcaatatggaaatatattaagataaatactttattaaaaggttttgatttataagctttctcattacttgctgctaaatttattagtttcctccttgaattcagcaacttttcttgggtttagccttgtaccatcgtggcatttcctataaacttcagaaatctccatgtgcattctactacgcttgtgctttaagtatgttgaatactattagataatttcccaaggattatattaattccactaatccctaggttagctgcaagatgaagttaaagttcacaactttatctctgcaactagattttgagtattttgcttctcatttcagatcttctctaagaaaagacaaaagaagatggtgttagcttgtgttcttgttgattttgtctgagcttgagggatggggaagacgaatgtattatcgaagatcagagctttcaatggcgtcaatagacccatctatgtgttggcaggtttggcttttcttatctcagtagctacattagctaagttcaactacatcactccactacgcttctctgatcggttctgtaactatcatggaagctttgacggcgacaactacaacatcggaagccaaatgagaaagacaatcgaaaccgccatttttaaaatccaccaagaaatggatgatctcaaggctttagaagctaattcttctactcctccatcctctgtttcatcagcttcaggatccatgtttaggcatgtagcttttcttgcggatgttctttcgctagttcagtcggttcatatggaattgccttcgttcgaagagagatccgtagcagatcatccgttgaagcagcagaaaggtgaccctggtgagcattttatgagagaagagataaagaagtacataaagatcaaacctaaccggctcgggaagcagaatttcatgggagctaacggaacattcacctcgatcgggcacgcttgttttgcgatgaagaaagatctagaagagtatatggactatgatgttggagaaatctgcaatgatgattggagattagctcagaagcttatggttcatggatgcgatccgttgcctagaagacggtgcttctcccgtggcccgcagttataccacaaaccgtttccaatcaacgagtctttatggaagcttccggataatcggaatgtgagatggggacagtataagtgcaagaactttgcttgcctagcaagcaacacaacagcacgaaaagggttctttaaatgcactgattgcttcaacctcacgcaccacgaatctccgagatggcttaaccgaggcgaaatcgatcctgagacgaaccaaactgcggatttctcgatagctgaagtactcgagattaaaccgggagagattagaatcggactggatttcagcattggcactggaactttcgcagcaagaatgagagaacagaacgtcacgattgtatcagcaacaatcaaccttggcgctccattcaacgagatgatcgctctgcgcggtttagtcccgttgtacttaaccgtgaaccaacggttaccgttcttcgacagcacgcttgatatgattcacacgacgaggtttctcgatggatggattgatctaatacttcttgatttcgtgctgtttgattgggacagggttttaaggccaggtggattgttgtggatcgatggtttcttttgtctgaaagaagatgtgagtgattacatggaagcgtttaaagcgttgaggtataggaaacataagtgggttgtggtacctaagaaagataaagatgataaagaagttttcttctctgctgtgttagagaaacctccaagaccctttagatgattgatcattgcatagtctctgtctttactattatctttgtaatcatattcttaaaacaaaacagaatgtcaaaataaactgagttatattttagttatatgttccaatttgcttgtataaattcagactaagaatttcaccaaaagtgttatatgtttgacatttatgtttgtaatccattgtgatcaatatgatacgacgtagtaatgtaactctctgagcgagaaagagggttctccattttgttgttaacaacaaaagcaatctccactaggttcgggatgaacgaaccaacaggctcggaccgtggaacgcgcggtatataaacaactttgcctctttgttcatcgattccgttacatcggctcattggaggaaatcggagaatggaggaggagaagctagaaatcgtcgggcctttggaggagccgttgatgggaaacatcgtaccagaggagatcaatggcttggattcgcttacgtcgtcggattctgatagcgagaaaccagattcccccgttcccataaatgctccgatctaccggatgtttggaagagaacgaccaattcacatggttctcggcggaggtaaacgtatgaaacattctctacactcgttcccattttcatttctcacagattggttcggtctgatgatatatcgcacttagggtttggatgatgattagattgcgtgtgaaactgtagaaatagagattaatggggattgattgaatatgtgacctaatttgttgaagctgctgatgtgttgctatggagagacaagaaggtcacgttaggattactcagtgcagtgactgtgatttggcttttgtttggatttggtggtcgtcgtcttctcacatctctttgtcgtggatccattctctttctgcttctatcattcctctggtccaatgccctcaacaagtaaagttctttttgttcgccacataaccctgaaatatgttttaagtaaaaactcaatccttgtttgctaatctatcatttatagatctccagagaacatgatggatatttacatacctgagaagccattactccaagctgcttctgcgatgacatttgagcttaattgtgcttttgcaaccttaaggagcattgctttagaaagagacatcaagaactttgtaatggtacttgtttagtttctcaagtctttttttagagaagcctctgatatgatgattgctttctttttgttctgaaacataggcagtcataggactttggctagtatcggtcatcggaaactggttcagcttcttgtcattgctctacatttgtaagtacacactggttcttctcagactcttgttttttctttctatttagggataatgtcatgacctaaatgaaaccaacaggttttgtactaattcacacggtgccaatgctttatgagaagtatgaagatgagattgatccaattgcagagaaggctgtgattgagatgaagaaacattaccaagtttttgaagctaagtttttaagtaagatccctcattagccaaaccactcaaaacatcgaaattgaattagattcgatttgcttagtttagttcattcatttattctttctttagagtccaaatcatttcgagtcattcctctgttcatgtggttttggttacttcgtcctcaagtcatctaaacttttgtggatacaaaattggctgggccttgaaaataattctctacatagctatgaaattctaaagcttacagtttaaattagttaagtttatgtgtttattttttctttagctaagatagcaacaaatcacacaaaaaacaaccctttaacgaacaaaacaaaaaaaagaacacatttgaatgggcttaacttcaatgtttcaagcccaatagacaccgacagatccaacattacaacccgattttaaaacgggtaaacaaataataaacacttcccaatcgccattgttactctgttttgagatctccctccacgcacatatcatcagatctacacttcccactcaaaattttccagaattcccaaattcttctctgtatatttcctctaacactctcgaattcactccctaacttgtgatttaaaacaagtcttctcaaattttgttcatctccagctacaaaaaaaatggcgcagcaaaagttccttcaccagcgaccaatccaaaacccattcacaaacccattctcttcttctcctctttccacttcttcaatctcaaatcgtccaatctctctactcagccgcaacggtctcctcctccttctcgctctcctcgttatcctcggcgtattcttaccctgggcaggatctcctttattcccgtctccaaacaaactctctccttctcaatccaaatggcgcgactattccctccctcaagctgtcaaattcgtagctaagaacgggactgtgatcgtatgcgccgttagctatccttacttgccgtttctcaacaattggttgattagtgtttctagacagaagcatcaggatcaagttctcgtcatcgctgaggattacgctactctctacaaagttaacgagaaatggcctggtcacgccgttctcattcctccggcgctcgattctcagaccgctcacaaattcggttctcaggtataatacatctacacagagttttcatcttctcgatccaattttatctctagcttccagttcatgaaatctagctgaaaaatggctttgaaatctgagaatccatacttagttttgatcagtgattcacttatcttgaatgttcgttgattagcttgtttagtccctgaggtttcggttttaagctgtgttttggctgatcacatgaataacaaaagatagtgaacttgtggttaatatatatgcttaagagcttctattgcaatggaatcgattgtttaaactaacttctcgtatgcatatcttgaatgttcgttgattagcttgtttagtccctgaggtttcggttttgagctgtgtttttgtacatccatggctgatcttatgaataacaaaagatagtgaacttgtggatctagtagcagcagccatttttcccctgtttctgtatgtgatactatatatgctaagagcttgtattacaatggaatcgattgtttaaactaatttcttgtatagggattcttcaatttcacagcacggaggccgcaacatctcttggaaattttggagttaggttacaatgttatgtacaacgatgttgatatggtttggttgcaagatccgtttcagtatttagagggaaagcacgatgcttacttcatggatgatatgactgcagtatgtatatttttttctcagacatcttcttcattgatggtatttggattagtgtacttattattgtcttgattatgttgtcagattaagcctttggatcactctcatgatttaccacctccgggtaaaaaaggaaggacttatatttgtagctgtatgattttcttgcgtcccactaatggcgcaaaacttctcatgaagaaatggatcgaggagcttgaaacgcaaccttggtccagagctaagaaagcaaatgatcagcctggttttaactgggcacttaacaaaacagctaatcaggtatgttctttcttcctagttccacagtaaaacagtaacttctcttctctgtaaattggtctcaataagtagttactacacaattggtgaattcaatgaaattctagcgtaaaatctcaaaagactgaagcttttgctacgccgagagaggttccgctttatctaaccgtagctactcaagcttttaatcaactctgtaatctacttatgaatgtttagttacgataagcttttttggcacacacatggctgatcttatgaataacaaaagatagtgaacttgtggatgtagtagtagcagccatttttaccctgtttctgtatgtaataatatatatgttaagagcttgtattgcaatggaatcgattgtttaaactattttcagaggaattttatgacatcaaagtttaaaatctcaaaagactgaaccttttagtactcactcctacgaatgttgtttcaattcgagaggtaatttgatttggtttgaattcattcttcaactctttttgtattatctctgttctacaggtggatatgtacttgctttcgcaggcagctttcccaacaggaggattgtatttcaagaacaaaacatgggttaaagaaacaaagggaaaacatgcgataatccacaataactacatagtcggttttgagaagaagatcaaacgtttccgtgactttaatctatggctagtcgatgatcatgcttccgagtctcctttagggaaattagagtaaattccaatggcagaaaaagattttttgtcgctccatctttcttcttgttattggaatattcaggctgcagaaaggaagaaagatccatcgagtaaattcttttacattttttgggggtctttaaagtcatgtgaagaggtgttgttattggctaattcaatacgagttgagttgaatttggtaatgtagactactagaattggtattgggtctgaaatttcttaaataatcgaaacaaatactgacagctagcatatgaatacgagggtccacaagagtattaaacatatttattttgaattatagttgggtgttatttccacactttataacatgtgactaattttacaatctaatagaccttttggaggatgctgcttatgtaagatttaccgtaaatgataaacataaattaaatacgctctttgacgtcccattgtttggtcacacacactctagacttttcattcattcgtgtgttactcaaatctatttattcccagatctgatatatatatttattgcaattactaaatcccaatttccataaataatgatttctatgtaactcgttccataaattaaattatgcgtctaagttgtaacatataataaaaggataatatatttttcagtcacaccaaaaaaaaaattgataagaaagaaaaaaaaagagtgaaaattagaaagacagagaagcaaagattcttgctccctgcgaatccgcagctgcttcgaaacgcaaatccgatttgtagtctcctttgattcttccattgacgatacagcttctctttctctcttctctctgcttactttgctttttactaagctcacaagaatctacgcatctgtactgttattatgctgatgctctctacttaatcatcaccaccgcacgcagttcgagatttctggaattttctgtgtcggatgcgtttgagattcatcgaatctacttggttatagattggaaatttaggtggggatttgagttgcttagcttgtggtaggttacattttcttgtttgagattcagtgaatctctccagagttgcatgtatagaaatgggttctttggaatctgggattccgacgaagcgagataacggcggcgtaagaggtggaagacagcaacaacagcaacagcaacagcaacagttcttcttgcagagaaacagatcgagactctccagattctttctattgaagagttttaattacctcctatggatttctataatttgtgtcttcttcttcttcgctgtgctgttccagatgtttttgccgggtttggtgattgataaatcggataaaccatggattagtaaggagattttgccacctgatttggttggttttagggagaaagggtttttggattttggtgatgatgttagaattgagcccaccaagcttctgatgaaattccaaagagatgctcatggttttaattttacatcttcttctctcaataccactctgcagcgttttggattcagaaagcctaagctagctctggtcagtagtttatgattagaaaatgaattgttctaatgatgcattgtggtttgtcttcttgagatctgatgacttgcattgtggttaaggtttttggcgatttgttagctgatccagaacaggtgttaatggtgtctctctccaaggcactgcaagaggttggctatgcaattgaggtatagttttgttgtttctttttgctcttttgtttattagtaatatgtatgaagttatgatacaacgaaacctcaaacttgtcttggtaggtttactcgcttgaagatggtccagtgaatagtatttggcagaaaatgggagttccagtcacaatactcaagcctaatcaggaatcgagttgtgttatcgactggctctcgtatgtctcgcctatcccatgctatttgtattgcttggaaactctttgggaactagtagtaaagcatgtcttgattaattcaaaactgggatataatcttgaggctatggttaatttgatgtactcatgtgattaagtttaactggagaatgtggatctgaggttgatcaaatgcattatggctgctattcttctaatattatagtgcaaacttagttgacttcacttggtcaatgcattgatttttagtcgttgataatttcttttggttcttatcttgaagctatgatggcataattgtgaactctctccgagctaggagtatgtttacttggtaagattttcggttctttagtatgaatgtaatatagttctggttttggtttttaatcttgctatattgaaatgacaatttatatatactgtatacatactaatatacgcacatatattttaacatctgtggattttttccgaagttcttgatagtttaaactatttttattctttgacagcttcatgcaagaacctttcaaatctttgcctcttatttgggtcatcaatgaagaaactcttgctgttcggtctagacagtacaactcaacagggcagactgaactcctcactgactggaaaaagattttcagccgggcatcggttgtagtcttccataattatctccttccggtaagttttaggattagaaccacaaaaaagatatttttgtttctgccttgcagtaggtttctggagtagttttggtcttttggatatttatcttgtttcacctttttgcttcatgcagatactctacaccgagtttgatgctggcaacttctatgtgattcccggatctcctgaagaagtatgtaaagcaaagaatctagagtttcctccacagaaagatgatgtggtcatttccattgtgggaagtcagttcttgtacaagggtcaatggctggaacatgccctgcttctgcaagctctacggcctttattttcgggcaattaccttgaaagtgataattcccatctcaagatcatagttttaggtggagagacagcgtccaactacagcgtagctattgaggtataacaaggtctgctttgctattggtaaaatggtttgtattttttaaagatagagattacaaaatcactaaccttgttacttttttttttttttgaacttcttagacaatttcccagaacttgacatatccaaaagaggctgtgaagcacgtaagagttgcggggaatgttgataagattcttgaaagttctgatcttgttatatatggatcatttcttgaggagcagtcttttccagaaattttgatgaaggccatgtccttggggaaacctatagttgcaccagacctcttcaacattagaaaatatgtatgctccttcttcccttgcatgtggcttgacggaaatgtgttgttgcatgttctctgtccatttgactttcactgactgtatttgcaatattaaataggttgacgacagggttactgggtatctcttccccaagcagaatcttaaagttctatcgcaagttgtgcttgaagtgataacagaagggaagatatctccattggctcagaagattgccatgatggggaaaacaactgttaaaaatatgatggctcgggaaaccatagaaggttatgcagctctactagagaatatgctcaagttttcttcggaagttgcttctcctaaggatgtacaaaaagttcctccagaactgagagaagagtggagttggcatccgtttgaagcttttatggatacatcgcctaataatagaatagcaagaagttatgagttcttagcgaaggttgaggggcattggaattataccccaggagaagctatgaaatttggagctgttaatgatgattcgttcgtgtatgaaatttgggaagaagagagatatcttcaaatgatgaatagtaaaaaaagacgagaagacgaggaggtaaggtttagatgcgaatttttgaaatgacgttctcatctccatttcctacatgccaatttgatttgttttatgttattacgcagctgaaaagcagagtcttgcagtatcgtgggacatgggaagatgtatataaaagcgccaaaagggcagaccgaagtaagaatgatctacatgagagggatgaaggggagctgctaagaaccggtcaacctttatgcatatatgaaccctattttggtgaaggaacctggtcgtttctacatcaagatcccctctatcgtggggttggcctggtgagtttccatgtgcaatatagtgtttttgcaaccataagatggtccaaaggagagaaattgttctcaactgatttgaatgtatcatattgcagtcagttaaaggacgtagacctaggatggatgatgtcgatgcatcatcacgtcttccgcttttcaacaatccgtactatcgcgatgctcttggtgactttggagctttttttgcaatctcaaacaagattgatcggttacacaagaattcatggattgggtttcagtcctggagagcgactgccaggaaggtaaacaactttttcttataaaatccttcatcctttgtatagtagaatgctaaaattaccctgtgatgtaatgtgggactttgaaacaggaatctttatccaagattgctgaagacgcattacttaatgctatacaaacacgaaaacacggagatgccttatatttttgggttcgcatggacaaagatcccagaaatcctctgcagaaacccttttggtcgttctgtgatgccataaatgctgggaattgcaggtagaaacactagagattttaaatcataattttataataatgtttgagactttggtcatttacctgactctttgcaatttatgggcttggatcaaggtttgcttacaacgaaactttgaagaaaatgtacagtatcaagaacttggactcattgccaccaatgcccgaggatggggatacatggtctgtgatgcagagctgggcattgccaacaagatccttcttagagtttgtcatgttctcaaggtacttgtttaccacattacccattgattgtctcagtcttagcctctttggagaaagaagagtgcttaagagtgtgttttcccatctgtttgtaggatgtttgtggattcactagatgcacagatatatgaagagcatcatcgaacaaaccgttgctatctgagtttaaccaaagtaagaaactcattccttcatctgcgaaagttcatgtgtttttagatctaaatcagatcagtccacttgggtttggatttatgtgttcaatttctcacaggacaagcattgctattcgcgggtactagagcttctggtgaacgtatgggcttaccacagtgcaagacgcattgtctacatagatcctgagactggtttgatgcaagagcaacacaaacagaagaaccggcgagggaaaatgtgggtgaagtggttcgattacacaactctgaaaacaatggacgaagatctagctgaagaagccgactcagaccgtcgtgtgggtcactggctatggccatggactggcgagatcgtgtggcgcggtacattagagaaagagaagcaaaagaagaatttagagaaagaggagaagaagaagaagagtcgagataagctgagtagaatgagaagtagaagtggtcgtcagaaagtgatcggaaaatatgtaaaaccaccgcctgagaacgaaactgttaccggaaattccactttgttaaatgtagtagacgcataaaagaaaacaaattaaaattgcttctttttttgttaggtcactaatttgtttcattcattgtttttggaaagattactgtataaaaggtctcaagtctcattcattcactctccctctctcttctcacctctcttcgatttaaccgacggcttaaattctccggcggtggagcttcactgtgaacaacaaagaaagagagaagatggaggagacgcaagttcttgagatcaatctcatctctgcgcaaggacttaaagaaccgacgggaaagctccggcgattgcagacttacgcatccgtctgggttgattcttccagcaaactccggactcgaattgatcggatcggctctgagaatccgatctggaacgacaaattcgttttccaggtatcgccggagtttctatctagcgaaacttctggtgtttcaatcgagatctacgccgttggttacttgcgagatcatctgatcggaactgttcgcttcctcgtgagtaacttcctcccaaccgccgccgtgaaagttccatctctcgtcgcgcttcagatccgtcgtccttctggaaagtttcacggcgttcttaacatcgcggctatggtgatggatgcttctgaacttccagctgatttcttcaagtcggttcaagagatccgtcggagtcggaaaatgagaaagtctagatctgcggttagttcgtcggagaacggttccgctgacgacggtgagagttcgaaagagaattcggtttgcggatcggttaatttctccgacgacggtactgactcgacggcgtcttctccgatgccgtctcctctcagagactggaacgctgttcgaaatttggcgggaaagaatcacgtgcgatcgtcatcggacggcggaggattgatgtgctgtttcttgatgaaatcgtcgggcatgttaccaccaagaagaaaaatgacggacggctgagatctgttgtcttgaatttccaacggttcagatgttcctttggttttctaaaccatcgatcttcgtcacgtgcatctctgtcaacggttcaggtctccttatcccttacgtcgtcgtttaggcagttttggcggttatgagtgttagttaacaaacagtttggaatttctttagttctagttgctcaaaacattatattcaataattgttgtttcgtttttgaacaattaaaaaatctttttgatatgaaatagtaataattcgtagatcacagaaaaaaagtgtagtaaaaattatgtaaaaagtgaaaaaaaaaaaaacgcgggaagtcgtttatgaagttttgaggagataattgttagtttaacggctggattagttaaaaccactaattacgtcctaccagaaataacaaaatcatcatcttttataaaaaaatcaatcactctctcttgtcttcttcatcttctctgtttgtgccttcctctttatcagaaattgcagcttgtacgaaaacaggtaaatcttcatatacgtagagcaatcaaatttttagttttaaggttttttattaagttcataaatttatgattttgctatgatctatttagggtttaaattatggcaaagtttacgagattgataacagccatggagctgagagccacggtggagaatcgaattcgatactctacaaaacacattaaacacttgccacctggctcaatcactgagtttgattggaaggattactgtcccgttggtttcgggtacgtacgtaataacatagtttcatgttttaaggtaaaaaaaagaagagaattggtttttgtaatgttttttttgttgttgtttgtagacttattcaagaacttgagggtatagatcatgatgattacttgctatccatttgcactgatgagactctcaagaagatttcttctgggaaaattggaaatgtctttcatatttccaatgataaccgttttctcatcaagattcttcgaaaatccgaaattaaggtaccccaaaatcatcttaacacaatctacttttaattttttcaagtgtgtatatatgttccatattgagtctttcattgaaaacaatcttgtgaaggtgacactagagatgcttccacgttactacagacatattaattatcacagatcatcactattcacaaggatttttggtgctcattctgtgaagcctcttggaggtgttaaggtgacaaggattatatatatataccactccattattagagtttgatcagccactaattagttacttttttggggatacagacatattttgctgtgatgtcaaacatgctacattcaacgatctttgtgaacaagctctatgatcttaaaggttctccgaaaggtcgatctaacaagaaaattgaagtgagaaacaccactgttttgaaggacatcgatttcgatttctgtttctacgttgatcctttggcgagacaacgcatcatcaagtactatcccacccccacccctctttctttctaccatcttgattctagttactcaacaatttattaaacacaaaaggggtcatctcattacaggcaaacaaagctagattgcgagcttttggaagaagaaggtataatggattatagcttattggttggtttacaatctaaaggctcatgtcaaggtaatgtttcttctctcttcttaggagtgcaactatttgcatatcgactttgaacttttctgatcataataataaatcactcttaacaggttcacttgatggattgaacccggtttacggtagcttcgcacctccaagtaaaaaatccttaccaacattcttcattcttttgttttatgttcttatataccaagtcttcaacataaatgtctaccgattaaatttttcaggctcgttcaaaagcaatagcacaaagtcgatgaagacggcttctagttctcctgatagatcttctgtagcaatgtattcatgctctcccgatagaggtaacaatgtaactttttaatctaattaatcatagtacttaacaaaaattacaatttttataaacttattgtcttactaacagattcagtcgaaaacgaaatgtcaatgactatacaatcagtgacaagcaatagcgcaagctcagaaacaaatatattagccacaacactcagtgacctctttcacaataggtaaagcattatcctactcctatataacaacattgctagaaatttcacatcaaaaaaaatatatatatatatctaacttttcttgtttcagctcaaatatcaattttgggatgaagattccagcgagggcacggcgagtgacgagagaaaccggagaagaagaatggtacaatgttgttttgtatatagggatagtagacacatttcaagactatggtatgaagaaacgcatagaacattgttacaaatccattcaatataactcaaactcaatctcaaccgtccatcctaagatctactcttctagattccaagactttgtctccaacatcttcctacctcacgacgatgatctctcttcgaaatattgagttgtttgttatttttgatttccaagtggaattattagagtgttaagaggtacacttcttacgacccaagttggtgttggtgtttgttgtccaaaaaatcctctcttttctgacttcattgttgatcgatcaacaaaatgtagagaaaaacatgaactattaatacacatatatcaaaaatataaaatacagaaaaagacaaaacccaaaataaaaaaaacccaacattgttcttggttcaacacaaaagaaaaaaccaatcaaaccaagtcaaccctttaattaaaactttcagttggaacatatatatctctgtttactttgttttgttaatcacaaagcagcatttagaacacttacagagattagtcttgtatgtctacattgttactctctttagatctcttagagattaggtttagccagttcaacgtttttctccttaatctctaaataattcttctgttacaacattacaacatatttaatatcttattatccttaacctaacaacttttatactaaacaaaacaaagccatttctatttgggctttacttatcttatggcccaattgacttttcttctttcttctttttcacgacgcttcttcttcctcctcgtacaacgggcttcttcttcctccattacttactcaagtatcttttctcttcatcatcttctcatctttctcttcaagtttctcttgtatgatattaagcaattaatagattccaacatagtcatgtttctgcgtttgattattgttcttggaagtataatctgaattggaaatctcttttattgcaggtttaagatgaagaagaaacaacaaaagcaggaatttgtagctgagacatcagagatgaacaacaacaacgagtgttctggacaagaccaacaaaaacgatatgtgtggccatgggttggtctagtagccaacgtaccaactgaggtggaaccatctggtcggagagtaggcaaaagcggttcaacgttacgtgatgagttcactctgaaagggtttaatccaacaagagtcaaacccatttggaataccaagggacatactggttttgctttggttgaattcgctaaagactttaaaggattcgaaagcgccatgcaattcgaaaagagttttgatttagaccgtcatgggaagagagattggaaaaaaggtaaaacattgtttttaaaagtcatttgcttttattgacattgatagagttcactttctttgtttggaaaaggtcatcgcttgagagatgataagctttatggatggcttgcgagagaggatgattataatcgaagtgatactgttgggaagaatgtcaagaagaagagggatttgaaaagtatctctcagattgtagaggaagaccagaggaaactgtatcatctatttgagaatatgtgtcaaaccattgagaagaataagcaacgtaaacaacagcttgaacagaaagttgatgagactttggagagtttggaatttcataaccttatgttaaacaatagctaccaagaaggtaaaacagaaacactttaataagctttctgtttgtgttttcatgctgacatgtgtattcttttggtttgtttgtttgttattttgatgagaagagattcagaagatggagaagaatatgcaagagttttatcaacaggttcttggtggacatgaaaagtcttttgcagaactggaggcaaagagggagaagcttgacgagcgtgcaagattgattgagcaacgggctatcaaaaacgaagaagagatggaaaagaccaggcttgaaagagaaatggtgattatgctttccttacaaattaggagaaaaatatcacaaggcaataaaatctttcttgttgttgttgttgtagattcaaaaggctatgtgtgagcagaatgaagcgaatgaggaagctatgaaacttgcagaaaagcaccaggcaagtacttctttagtgtttctttagttatgaacaagtaataactaacaacttttgcagaaagagaaggagaagcttcataaaaggataatggaaatggaagctaagctaaatgaaacgcaagagcttgagttggagatagagaagctgaaaggtactacaaatgtgatgaagcatatggtgggttgtgatggagataaagatattgtggagaagatagccaaaactcagatagagcttgacgctcgagaaacagctctccatgaaaaaatgatgactctcgcacgaaaagaacgtgcgaccaacgatgagtatcaagacgctcgtaaagagatgattaaggttcgaaaacgttctaaatatatctgttccaaactctttggcttgtccttttaacttgtggaattacttttgatgatgagcaggtatggaaggcgaatgaagagttgatgaagcaagagaagattagagtgaagataatgggggagttgaaccctgcacccttcttgcctgcagtgatgaacaaacataaggctatgatgctgtgttcagtgtgggcagcagagataggagatgtgcaatggactccatttagggtcgatgagtctgatggaacaccaaaggttaggactttaacttaggagtctacactttcataaatctcaaaagatgggtttgtagcaaaaattacatatatctcaacattccaaatgtgaaatgcagagagtggtggatgaaaatgatgagaagcttcgtatgctgaagaaccagtacggtgaagaagtttatagtgaagtggtaagagcaaagctagagatggaggaacataacgctagtggcagctatgagactgaagagctttggaactatgaggagaaccgaaaggcgactatcgaggaaataacagatgtgatgttgaagataaggtccaaacttgctgctatgaagaacaaacgaaagaggccttgaggagacaactatgaagagccttaggaaaatgttgtccctttttgttaagtttccagtttcaattagtttttcttatcttgtgttgttgattgataatatatcgtagagtcttagatcacaagaaatggagctgagaaattgtttccggttatgtatgtttggttaaattggattatgaattgcttatcattattatatacttacgtatacatgtacttgtcgaacatatattagccatgtacatataaaggattttggttccacatcttgttctctgttagttttgacaacttgacaatgtctgattgttatcaccttcaaaggctgtttcagatcttttgatacaacgtttaaaaaagtcagagacattgcatcagttttcaggaaaaacctactcaataaaatcagattcttgagttacaagaaactacatgaagccaaagctttaccatatcctaaggttgccaactttgagtcttctcccaaggcttgaaaacaccatcatgagaaacatatttcaagtaaaagaaaaagccacgcagcaacttcaaagctcttgccttatcatcaacaccaaccacaagcttgtattctttttcgaaatcagggaaactttctagataagattgtcccagttcgccagtctcataaacagatcctcttccctttcgtagttctctgcatcgagtcatttttctatggattgatacgtcacgatggagctgcttcatctcttcttcatcatatggttgtttcagaacatccattagctcctttctaaaccaagtgatactactttcattctttttgcttccttcatcaagatcaactactttcttggacgccacaaacggtgtacactcttctacatccaaaaacggcgaatcacccatcgcaattatataatcagaccaatcatgatctggttcaaccttcacttcgactagtggatccatttcaggtaccattgtcgattcttttaaagtatccatatcatctttctgaagattttccattggctcagttgtcgaatccctaagagaatctacaagccatgtgaggtacctcatgtaatccttatccacaaccgcttcactaccctcattcttcttccttctccctacaaaaacttctttgctccttgaacaagtctcatctacatcattaacctctgtaactctatttactcgctccacatgatcaatctccgcaacaaccctcttggctagttgaatctcttctgcagttctaaccaatggaactgtgttgtctcgttgactgtcttcttgacttccaaccaatggaacatcatctcttcttaaagtctcagtctcagcctttgaatcagaaagtttcctaactcgttgttgaatgtcttcttgttgggtttcgagtaaaggaacgtctcttgaagcctttgcagcatctaacatcgcaatcctccgctttcttcgttcagcaactctgttgtctcgttgaatgatgtcttggattttatctctttcagcctttaacccaacagttttcctctggccctgttgatgaactctgttcttcattggattctcattctcaagctttgatatcttcgaatcacaagaaaagatctttaatttacgaatgtcagattctccattgtcaacttcaagacgagggcttacacttcctcttcgaagatgatccaagaagacgttgtagtccttatcaatcataagatcatcatcatcatcttcgtcaagacagataattggaatatatccatcatcaatcacaatggctttcttcttcatcgcaatcaacactctattaaatcgaataaaacagaacaaaaattaggaaataattatgcaaggaaaaaccctaatccttgtcgttaaaaccataatgcagaaagaaaccatgaaagctatataaagacaaaacaaagaaagccaaaacagatgaagaaacgtagaattaagcataccgtttagagcgactctgcttgtgaacacaaaactcagaaaatgaaggagattttggagagaaaaggagaatgttgttctcaagaaagagagagaaataagaaacggaaaaggaaagaaggtaataatatatattagggtttaaatgcagatatcaagttttgctacaccattaaggaaattttggagataaaaggagaatatgaagagacgtgagataagacttgagagtggctacgacggctatataaattattattctcagacacacttgagcatgcattgggttacattaccttttgatggatttggtattcgcaaaacaaacttttatttcaccttgtttttgccagtatagagatattcttgcaattaaatacctatcaactaccatgactcactaagtacagagtaatattatactctctagaacaaagaaactaagaacagagaaagagatagagagaatgtgagaattacaacatgatgttattcgttatcttctttaatgaaaatttcgattacttaattacaaattacagaggaaaatgaaacacaacacacagcttcatagttcatacctacgcagagctgagttgtattaatgttatagtaatttttaatgatatgtcaacacgagaaaaatctagtgtttttattgtattgatgatattgatttccaactaaaaacataatcatagttcgaaaccaaattacacaaggacaaaaaaatagctttactcatagactgacgttgaagtatgggtggtgtttttgaaaagtttttggtagtttggtgagaaatttgaagactatctatttgtttatatagagatgaaaatttagaatcattttccttctatgattaataatttattgtaaaattcccatatagctattgtatttttatataataagattgtataatttcctaaatctatttaaaattttaaaataaaaaataatcatttttcttttagaattagtagcttcaaattagaattagtatctaatttcttttttgtttaattttgtcagcaactttatattatttctaattttatttaaaaatatacatatagttttcttataattatcttatttacatatgaaaaatgtttagttactatataattattatttttactttataatttcttataactattttattagagttttaagattaataaaagaatttttttgtctaagatgtatcaaattctgagatcaataaatttgacacgtatcgtgaacctatgaattaataactttgaaaatcatattttatataataagatcttaaaatggcaataaaaagatagattataaaatttggaaatcatctaaatattacacatctcatttagtttatataactttactttgaaatatatatatatatatatatatatttatttatttatttcgaatacgacaaacacaaaatttgtattattaaaatctcaaaaaaaactaaaccccatagattcatataataatctttgaaaggaaattttttaaaaaatggaaattatctaaatataccgcatatcaattcatttatataactttttgtcaatacatttatttcgaatacgacaaacacaaaaatttgcatttttaaagtctcaaatacccaaaaaaacccatatctagattcatataataatctttaaaaaggaaaaaaaaaaaaaaaagaagaagataaatagtaaaatttaaaaatcatctaaatatattgcatatcaattaatttatatatctttatttttatgtaaatatatattcatttattgcaaatatgacaaacataaaagataactaataaaatttggaaatcatctaaatatgttgtatatcagttaatttaaataaatatattttgatatgtacatattcatttatatcgacaaatagaaaagattttgtatctattaaaaagcgcaaaaaccctaaacctcatagattcatataacaatattcattaataaatatatattaaaaaaattactaacaaaatttttagaaattatctaattatatctcatatcaattaattttggtcgtatgttagttgtagtaaatgtttactttctgcaatcaactattttagatatgtatataaaattggactttctaaacagtatatatataaacacatattggctaaatactaatgagagattacggtgggcaacgttgaatagttcagctctaaagaattactaaaacttgcaaactcttcgataaatctatttataagtatcttgaaaataaatctcttcctcatctgctctcttgcattgttataagatggatctctcactctccggtggtgattttaggtttgctttcaacaacgttaatttttctgatcgtcttcttcggatcgagatcacccaaagcagcggtgagggtgaggttatctgttctagtatcgtcgattgggctagagatcgcaaacgcagaagagaagatgtcactaatcataccaatggttatttttttttgtgtactttgatatttttgcctaacattaaaagtatatatctataaagtatgaaatgtttattatttttcagatgctacatgtcacgtggagtctgatttaaacaaaaattcgtgtgagatagttaatgagaacagcaacaacaaaacacaagtattggtaactgcggctgaacaagaaccaaaatcaggtaatttatattttatctttgcatgtgactgcttagttccttttttttaagtgagatgattcaatggtgtttgtaatttgcaggtggtgaagatgagaatgagaggctcactaataataatacttcagttctaagtgttcaagagttacatataagctctgcaattttggcagccaaaagtccatttttctacaaggtatataacttactcatttatttgatacaatattaattaagcaaaccatattatatcaattatttgtactatgcaattgagacagttgagtgtaatttatgttttgtcttagctattctctaatggaatgcttgagtcggagcaaaaacaaatgaccttgaaaatagatgcctctggtagttactaactgaatagctttttcttccttatggtgattatatttgtgaaagtaatttgttagacttttttgcaaaattgcagaggaaactgctgtaatggagctcttgaaattcatgtatagcaattcactatcagtcactgcgtcctctgctttactcgatgtgttaatggtggccgacaagtttgaggttgcttcatgtatgaagtattgcagccaattgttgctcaaaatgcctatgacattagaatcttcattgcttcttcttgatcttccttcaagtttgctaatggctgattcagtgaagcctttaaccaatgctgcaaggcaattcatagcctctcgttacaagaatatgtccaagtaacttctctttgtttccattaaacttttcaaagcataaaaaatatcattcattcttacattttaaaaaacgttttgataggattacaatggaggagttgatggctttaccgttagtaggtatcgaggcgatactagcgagtgacggtctagagatccaatctgaagacgttgtatatgaagttgtcttgaaatgggtcaagtcacattactcagttctagaagcacgccaagaagtactaggctctcatctcgctcgctatatacgtttccctcacatgacaactgacagactcaagaaaatattgacctcaaacgactttagaccttctgtggcatcaaaacttgttgttgaagctctcttcttcaaaacagaatcgttggctcaccaacacgttctactagcccatgaacaacctgcctcaaccagccgccggtttgctaaacgagcctatgtacacagacccatcaaaattgtggaatttgcggttcctcggccccaatgcatcatatatttggacttaaaacgcaaagaatgtgaaagcatctatccatcaagcaggatatcatctcaacagtttaccttaggaggacaagggttctttctttcagctcaatgcaacatggaccatctttgtttaatccattgtttcggattgtttattgggatgcaagaaaacgggtcagcgagtgcgagcgtgactgtggactacgatttttcagtgaggtcgaagccaacgatggaatttgtgggaaaattcaaaggaatctatacgttcactagaggtaaagctgttggatgcagaaacttgttaggtataccatgggatattttcacagccaagaattgtccctacttcatcaatgatgttcttcatctccgggctgatctctccatccgcctttagaaccaaccatatcatttgaatctctttaattgcagccttgtttctattggtttaggttgcgtgcatctgaagcaatcatgaaattcaacaattccatataatgtaaaatatttttcatgcatgttttgatcatctttgtcttttattaagttcattttgaagtatgtgcctcctgaaactaagtgtggatccaagataatagtttcagatgcaacagatacaatgttgaaacagagacattgtataatataacacgatattacaggaaaacatacagagagaaagctggttttatttgaaaatgaatctattcgcttcctgcgatcttcttcttcaaggattcaatatcctcagccaattcctttctgcttgactgtaacaagatgatcatttcatgtcagatcattgatgctttatagattcacaagaatccaaaaatagtatagttttgttaccttgaagagaaggtatctgtagacaaaccatccagtgtacccgagaccgacaagttccataactttcggaagctacaaacacaagaaatggaaacatcactttaactcaaactcattacacattttctaatctcaaaagaattatatagagagtgttgttaccagaggaacagagttgatggcaccaacaacaatggaagataaccaaacagcaacaatggctcctcctccatatataagtacagtagatttgttctcaagaccatcccactgcaccggaaaaaaaaaccaacaatcaaaacagaacacacaaagccaaaccaaaccaactcggttttttcttcgataaatggttcaccttttccttcaaatctgtgatgagttcgttggtatcaatggacgaggtctcttctgaagaagctcttgtcttcaacaattcaactttttgcaatccattccctgcaatttgaaccggagaatcaaatgttttggtttagattccgtctcaatcaaccgaaatttgtaaattttaccactaaccgaaccggtacatcgctaaaatttcgatttcggaccggaatattctaatttgaggcaatttgtgacaattcagacaatttctcgggaatgtatagattccattgaacccagaaagagagattatgtaaataaatccgtcacctgaaacaagcttcaacggaacggtgaaagaggatcggccaaaggagcgaggaggaagataagggacggcggagcaacgggtggatacggcgggaacacgtggaaccatcacggccatagaggacgaagctgctactgatatcgccattgaagcacgccgagaacttcttcttcttcttctttgtctgcctacttcttctctactcgattttttttgcagctgcgctttttactaaacaagattcgtgtagtaacacgtggaagctcctcgcgctcttattggtcgctcctcttatctttagaaatccaactcagtggtgtttatagaatgctcgcattctgtggggttttaggcccatctattatatgggtcactaaaagcccatcttgtttttttgataactcttgtctttttctaggtgaggaaaaaatggcaaatgaatgcaaacctttgatttttgtttctaaccaaactataagacagttacgaggacaatacgagattaactaaaaagagaaattcgaacaatgaactttaaatatctaactctaaattatgttttgtataagtgaatgaaaaaacgaaacttctttttgataaaagaaatgtggcaaaaagagagaaataaataacaaacccactaaaattgagtgatggtacagctcttccaccctaatacttcgctggcgctttcaactactaaccaaaactccatttctcttgttaatataacaaaatagttgatattataaaagttttatttaatcttatttggtagtttttgtatgattaatataatcaacatacgtattcatctaggatgagttggcatgaaaaaacaaagagttcgctatctaatttttccaccagaatttaaaattatttgagtccatagatgtgagatacaataatcacaagtttacaacataatagtataatggtttatattaatgttgttggtgcattaacatttcaattcaaaataaatatacatacattttttatagtaaaactgatagtttactcatttgcaatgacaatctaattttcgactgtatttaaagaaaaaatgaatggttttatgtacgatttcataaaaaatattgttcatttttacccgaaaaaaaaaaaaaaaatgttcgcacatcaaaatagtccacgatgagatattaaagatgagaattttaaaatatgaagaaaaaaataaattttcaatgtggtaatagtattattattttacagctattttaattttatcactaaattgacagaatggttgaacaaaaattcaatattttcttataatcatattacatgtgaatcgtaagaatactaaaaccaaagaaattgcatgatcgttacgtcatcggcatataatcatagccgacatcttcttttttcttatcacctccattacaaaattttgattagaaaaaaaaataaactccaacttcaatataattttgggtcaaaaaaaaagcatccaccattaatacagctcaaacccaactttctctccccttttttcttacaagtttgaatatcaaagtacggtctcttttttttctatataatagttatttaatcaaccatacacattcatcaaatccatatttcatgcagctgttacatttttattatatgtcctcttacttccttttgagtgtgtatatgtgcttaattatattccctcatcacaacctcaatctcaatctcaatcatgtctccaaatctcaatcatgcttcttccactttgattcttatctatctggatcacaattctattcatatcctttaatcaaaatcatatcatagcttcttttttttatattactaatcttgatgaagatcaccaaaactcattttggtcttcttcatcatcgtcgttcttgattttctcttggcaatgggatctacaaagcttggtctcatcatcatcgtcttcgtcttctgcatcatctctaatctacaaacgatggttcattgcatcaacaacatttcagatttggacgatctgatccgttcatacgcggctcgtgcgactacaagaagacacacaggctcgttgtacgatgtttcacttccgtcaaatctttccgacatcaaagcatcggttgttacggtccgtaacagtatattctggagaaaaggaacaaactttagtggtgttttgattcctccgatggttaaaacgtcgccgtacgctaaaagaatagcttttgtctttgagagtttcggtgataactcttcatcggtttacttccggttagctgataattactcatttgtttctccggttattggattcaccggttatgacgcgaccaacacgaatgatctcaaaaaattgaacctttcgatcaagagagacaagccaatcttgatcaaattcgatcctcacgcttctcgtgatcgctcaaaagtcaaatgcatcgtctttggagataatggtttgttgttgaacatcagcaatacgatacggaattacgagtgtgccactacgaattctcatgggcattacgcacttgttgtcctaaaccaggagaaagtcaaaccgaaacacgaaccggtgttggttcggaggaattggtggtggattgttttaaccgggattggagtttcggttattgtagttgtggtgatcattgtttcggtgaagttagtgaggaaaaagaggttaagagatatggaaagagagtcggagaagagtgaaacgatcggaaatgtttggattggtcggagtagaatgccggcggcgacgatggttagaactcagccatgtttggaatatcatgaagatcttccttcatcttcgaatataccatgattttttacttttgtagtttctggctctgtgtacagttacattcaaagttgttcattttttgtcaagtttgtttcgttttgaacttcttcacgtttatcttacgcatgagtaaactgtttgtcgttttagcacttcattgctcttagttattggtcggtacttagtttgttaaatgtaataatatattgtagtaactgaaacatttaatacaaataaaagaatgaaagtaaaaaacatgaataaaatatataagttgtttggttatgctaatgaaatttaaatgattcatttatgtctatctagatttctcaatttttgaaagagttgctcgtattcggttggttatgactttctttcaaagaattgaaatataatttaatttcattagtataacataaactcgaagaacaaaagaaagttttttttttctttgatatttttgtcagaaaattaatttgggtttttattttgtataggattaatctatttaaatgactagcaacatcaaaacattatatttcttaggcagtataaggaagcaagtgaacacagagtagagaattgaacaaattgagtacaagttggagatgttttgtacaaatttagcataaaagtaaatttctgagaaaaataaaaaataaatgcaacatgcagacacgacatcaaaacgctaaatgtcccaaataatatgggaaaacaagtgcacacagaaaaaaagaattggaacagatcttggaatacaagttggagattttttttctccaatacaaaaacgaacttcatattatcaagcatcacttcaaaagatgtgtggaatggaatacataaaatccgaagatgttaatgctcaatacaaacataatagaaaagagaactagaacaattcttcgaatacaaagaaaaaaaaagaattgaaatagttcttagaatacaagtaggggtgttttccagtacaaaactgaacttcatgttgtagggcttcacattaaggcaatgtgcatgatcgattacataaaaatcggagatgttaggctcacgtaaaacaacgttgtatcagaaaagtatggctacaacaatacgttcaactctagtgtgatggtttacacaggtgaagaagataaaaatcggagatgttatagggcttgcatgatcgattacataaaaatcggagatgttaggctcacataaaacaacgttgcatcagaaaagtatggctacaacaatacgttcaactctagtgtgatggtttacacaggtgaagaagataacgtaatcaacaaagaaaaaaatattcgagatcagaaattggccaaagggaacttagctttggctaccagtatgaggcacaactggactagtctggtgatactgaaagtgatacatggaaaggagagatgagatcacaaagggaaacattgtatgatgatggattgcatataattgaaggatattgggttttgtagaactcctggtcaatctccattaacaattgatattattattatcagataaatggaaacaaaatagatgagtatcgtataataaagactagaattcatacattcgtgcatggttatgtttgtagacgtattttcatatatcattcataatccaaactcatatcagtttgatatcagattcggtttcaatttggtcaagaaaaaaataaatagttagattttttcttaatatcagtaaagaactaaagataacaagaacatttatttttatatctaatattatttgttcttgttagaatatttattttcatatctagtattagaattttctcatttattataggatataacagtgtgtttaaatgaattcatactacaatttgatataggttgggtggaaaccattccacatttagtttattaaaccggttattttgggttttcttggtaaaatatttgatcttttgtcattgattcttcttcatattttttctttttttttttggttttatcctaactgtttttatatatgagtaaaataattatgaaatgaactaaaaatatttgtggttgaaacaaaaaaataaatgaaaattaaacaacaatgagagtgggatagtaggatgaacaacaacatactgtaataatcattttgaagtggaagagtattcgacattatattgtttccattagttttaatagctggaaaagacttaaccatattgaaaatattaggaaaaggaaataattaaatgattagaaattggaaatatattcaaagtacatagttttgatatttctatgtattgcatattcgttacttgtcttagttttcgtgttaaattttacactttataaagtatcatgaagactttattgctctcccaagtttataagataaactttatgattcaagaagtataggtaaataaattttaacatttatatcatgttaatgaaaaatattggcaaattagtttttctttatacttgatttgataacatatattgtaataatattacatttcacgatttggattatttaaaatatttaatttcggttcaaatctaccacatttcttctatagcgggagttttttctaacggctttctcacccaagtgcaattgaatataaggttaatttaattatttattaataagtactttgatataataaatcatatgtggtatttgatgagtatagttaacgcatagctgatatatatagtattacaagtaatgtccatacaaaatacggcggcacaacaagataaaagatcaatcgtcattcgtcacgtaaactttaaacaaatctgatatgcacgaaaaaggtgacaaagaaatgtcatttcgtaatccaataaattaagaagaatcaaatgattaggagaacaatcgacctgtaaagcatattacgcaattttaaacatatacatataatatctaattatctatatacttttgcttgtcacaacatgcttagttggtggatagtttagaaattcatatttaaaaaattaacaactaatgatcttatacaaagctaaggcgaacataggttattgagtatgaacggaggatatgatatcgaaccgtcgagaatggccatggaaatgtggtgatttgcggcctccgtcgcatgaattccatcccaactcacgtagttgtgaggatcatggcaagctttggccgtcgtagaaaaatttccaatcactttggtgttgccacaaaataacttctgattgaaattgtatggacgtccaccatatccacaacaagctttaataccgtgtttcataccttagatattatcatatatgaaagcaaaacaaaaggattcggttacgtaaaataccaaaaattgaaaatttatcggttgaagtacaactaaaccagataaggttatgacataacgtaccgtaggatttggggtgttgaaagagatcaagcaatatcttgtgcgtgtctaaataaattacggtagcgttttttagttcggttctggtctgagataatgtcttattcaataacgtgttgtaatatttgactgctttgtttacaggaatgagacatccatacttgtctaaatcagcatcggtatgagtgtaaccggttaaaatcgccgggtaacatccaaccggtgctaaattcaataccaaaaatgtccgaccacctattccatatatctcctacattcaagagcaaataacttaagaggaggatatgaaccatacaaaaatcggatttccaaatggagaatacgaattataagtgggttaagataatatccatacaaatgtttcgagatagtattaattttataaaagacttgattctataaaccaaaaaccttgtggtgaggtttgtaccttaatcgttccagcaatttggcctatgacttgtggaagatatagtttcactctctcaactccaatactggctaaattggatgtgaaatcgttttgaccaatataaaacgtgtatagcgattttccgaaaacaattttagacggtaagatcttcaatcctaaaacacaaggaagtatacgtcatttgtttattatactcatgatcattctatacatgcatcggttagagactatagatatatatacctggtcggtccaaagaatgtgactcgtcgacattaaccttgaattgtttcatctgattcagctgaatagcgagtgagaaagggctgattccggagacaaataaagacgtgtttggcaagagaaccgtggacgctaacgtcgcaaagtttgcgccatgtcgaaaatccgatccaatagattgcaaatatgggcttaggaaaggcattccaagagatttggctaaaataatttaacactacgtttagcactatagtgataatttttgggtaataacagtaagtattatagattttgtttaaaatttcaatctaaaatcctaattattagacctggaaaaataaattgaaccgaacgtacagaaccaaatccgaagaaatgaaaaccgagtcggtaccgaaccaaaatattttgagtaaccgaaaatatccgaaatataattatcttttcaaaaatattagttattttttgactaaatagtaaaaatacttgaaaatatccaaaaaaaatcaaaaagaaccgaaatatccgaaaatattcaaagcaaaataaccgaatggatactaaatatttaaaccgaaagaaccggaaccaaacccaaatttcaaaataagcgaatagatattaaacattagacccaaacagatacgaactgaaactgaatggataactgaacgctcgaactactaagtatatcttaaatatttttaaaaaatattttaatactaaaggatacaaaaaattatactttgtagaggggatttgatactgctgtcatattatacgttttttgaaaattttgagagtatttgttagtcatttgttacctagaaaatcaatgataagacgaccgtctgaagcacgaccggctggtttcttgaaataagtcattccccatggaccagattgggcaggaaaagcagcccaaaatccgccagtgtccgaattcgagtctccgaagttgaaaattgcttcgaaatcacattttgaatcacctttatgcccataaagcatcacaataatcaagactagaagagagaacgatcttcttctgtttatatcggaagccatgtctatctctgtgtgaacaaaatgtgtgtttgtatgtgagagtgaggatgagatatttggtgctatatgattcttgtaatcatcccgtccgtgactctcactctcattgtacgtgtaattagtgtgttatagccttaatggtttttttagtccaacaattccctttaagcccaataaaagataaataaagcccaatctattatattgattccaagggttcaatatatatgagatatgtctaacaatacatcaaaagaccagtttgaataacaacacatcaatttatggattggatatgaataagatgtcatgtatgcaacaaccaaatttgacatttctcttgtaatgccttgcaataaaagttattttgttaactttttgcaaagtatgtgccaatcaagaacaggataaaaaggttgggtctaataattcaactacggcccaataataacccaataaaggagggtattaacgtaaatttatgtcttggaccgggagtctaactgcacgcgtcaagtggctcccactagaattggcatcaagaacacgtcaccttgaccttgtcggatttgtctgaaattgaattcattctttttttagtgactctcttaaattggaattagatcttcagtctaaatcttaatgattataagaaacaagattatatgcatcatttcggatttaaacaacatggattaatctcaactaatttagcattaaagataagattttgttaacccttttttattgggtggatcctacgtggcgaagattgagtcatcgtctaaaattttaaaaaagatttcaagaaaaaattaaaaaatgagctggcgtcgaatcccacgttgtccgtagggaccacaacggtattccttattcagtgggacacgtcagctttataaaaccactaacggccgacacaagtcagtagatcctacagtggggaccactctaacctttttctggttaaaaaaagatatattttaccgtagatgaaatcaatattagccgtcgattaaatggtaaaaacaaatatgcttgatttggtagtccacgtttcgtcatctgtggatctcaaatgaattatacattatagtttaattctgtattttcattatttaaaaggaataaaatcagcagcacgtcaagtctacgtagagatctcaagatgaacggtggcgattatgactacgtgtaccaatcattatttaagtcagatatttaaaatgtccagcgcagatctagggttgccagctcagcatatgcgttccctttgcaaacccttcaagatcatgacacgtgtacggtgacgtgttcatcagcctcttggcgctccgttgtgtctctcttctttttcttctcttctccttcctctctcttcttttaccgaactctggttctagagagagaaaccattctctccgactaagagagagaagcgaatttgtttttttttcttttgtgggttcaattcgaattgttttccctgagactcaaggtacgtttttggattttggttttcgttattttcttcaatgaatatctgagtgattatatatgaacgctctgttttctcgagaaagtgtgtattgagtgaagaaaattactaggaaagttaaaggtagattgaattgtgtaactctactagttggtgatagttttgaacttttgacagaggaaaaaactcgactttgaatcttttactggtagattcagtggtgctatactttatagttactcggatctctgttatatttatagtttgatgtccacaattgcgagatctaggtgtaattgaatactgttcttttagatttatgctttacagaggaactgctaaaagatctgatcatttttttgtttataaagttactgtgtcattactctgcattgagcaatgggtagcaacgaagaaggaaaccccactaacaactctgataagccatcgcaagctgctgctcctgtaagtaatggaatcaatggaaactgattggtttagtaacagatttgtgtttagtcaaagtttgattgttgttgttgttttactttgtatatatacaggagcagagtaatgttcatgtgtatcatcatgactgggctgctatgcaggtgatttttctttgaccttgttttgtttctgctgtgtgaattgtgttttattagcctgagtgattttagcttgtttctcatgatatttgtaggcatattatgggcctagagttggtatacctcaatattacaactcaaatttggcgcctggtcatgctccaccgccttatatgtgggcgtctccatcggtacttatattaaacttgttgaatgtatatctgttactttggattgagtttgatctttctttgttgttgtagccaatgatggctccttatggagcaccatatccaccattttgccctcctggtggagtttatgctcatcctggtgttcaaatggtaatcctcccttccttttagtggttactttatatcaacaaatagttgaaaagaccagatttactgatttgtgttttcctactttactttaccagggctcacaaccacaaggtcctgtttctcaatcagcatctggagtaagtcaattgtcttgtgatgtttctgtgtgaaatgtgcagtatgatggatattggatatgaatgtatgagaatgtttgcaggttacaacccctttgaccattgatgcaccagctaattcagctggaaactcagatcatgggttcatgaaaaagctgaaagagttcgatggacttgcaatgtcaataagcaataacaaagttgggagtgctgaacatagcagcagtgaacataggagttctcagaggtttgtcaaactagcctcaactctttcttattcaatagatacttagatatatagaatctaacgtggttttgatatcaactagctccgagaatgatggctctagcaatggtagtgatggtaatacaactggggtatggactcgtcctctctgctctgaactaggtttagatttatcttttgcgatctttattcatattcttctttttttattaccacagggagaacaatctaggaggaaaagaaggcaacaaagatcaccaagcactggtatttcttcctgaaaaataacacaacgcaaataattgtatgcttttaatgtttacaactatttaaagctaatggcttttgtacttggtaggtgaaagaccctcatctcaaaacagtctgcctcttagaggtgaaaatgagaaacccgatgtgactatggggactcctgttatgcccacagcaatgagtttccaaaactctgctggcatgaacggtgtgccacagccatgggtatagtattcttgtgccactctcgttgacttcatttattcgtgacatccccttttgtttgtttattggtgttagtgtgtgtttatctgcagaatgaaaaagaggttaaacgagagaagagaaaacagtcaaaccgagaatctgctaggaggtcaagactgaggaagcaggtgattgctactaaacattttgtaactaaagactaatgatgagagctgatagattttcatatttacttaatggattgtttgttgttcacataggctgaaacagaacaactatctgtcaaagttgacgcattagtagctgagaacatgtctctgaggtctaaactaggccagctaaacaatgagtctgagaaactacggctggagaacgaagctatattggtaacaatctactcgcattttgaacagtaatcataagtctattgatcataataacgctagttattcctctgcaggatcaactgaaagcgcaagcaacagggaaaacagagaacctgatctctcgagttgataagaacaactctgtatcaggtagcaaaactgtgcagcatcaactgttaaatgcaagtccgataaccgatcctgtcgcggctagctgaccgtggccgcaacaatgagaacccgatatttcttcctttgggttgtgattgtaacttaaaaggagactttttgtttttattcttagatttgtagctctctgcatagtgagcagaaattgatgtaatatggtttaagagattcggtgttctctggtgtgtgctgcaaccacataattggtgatagataggtttagttatataagcaaatgtattagagataaggggagacatatttgatggtctttcgtttcgtaaacacacttttcttatgtgatatataaaagaagatttatcacattagtcttcaaaatcgacgtgcttcccttaaccactaaacgtgagtgtttgtttgtacttttgacagataatttggtgagattcctcgtaaattgaatactaaaatcggtctgattaattccatatttgtcattgttcaatatcttgggatgtttgattactggaataatgcatgtttgaagaagaatttgtatgaaaaaatatggaagtcatctagaaatctagacacaaatgtattcattaccaaaggccataaactcatgaccaagtccaatattttaaaaaaacattgagcaattcatattacagagagccaaaataatttcagtaagtggccaaagtgtcggaaaaatcaaattacttaatttgtgtttgttggtaggacaggatacacaagacttattttattatagacaaaatcataacattgtaatattttataagacatgaaagctgactattcaaaatttaatctcaattttactttgtagttatagttaaacttaacattacatggagaagagaagaacagagatcatcaaagaagtttaacgaccaccaccggagactaagaaatggcgggagagactctacttaaaccggtgcttcaaaaaccaccaggctaccgtgagctccactcgcaacctcaaactccactcggttcatcttcatcatcatcatcaatgcttcgtcgcccaccaaaacatgccattcctgcggcgttttatccgacgaagaagagacaatggagtcgttgccgcgtcttttgctgctgcgtctgcatcaccgtcgccattgtcattctcctccttatcctcaccgtctccgttttctttctttattacagcccgagactccccgtcgtacgtctctcctctttccgcgtcagcaatttcaacttttccggtgggaaagccggcgacggtttatcgcagttgacggcggaggctacagcgaggcttgatttcagaaaccctaacgggaagttacgttactattacggtaacgttgacgtggcggtgagtgtaggagaagatgatttcgaaacgagtctcgggtcaacgaaagtcaaaggatttgtggagaagccagggaatcggacggttgtgattgttccgataaaagtgaagaagcaacaggtggatgatccgacggttaagaggctaagagcggacatgaagagtaaaaagttggtggtgaaagtgatggctaaaacgaaggtaggattgggtgtgggaaggcgtaagattgttacggtgggggttactatcagttgcggtggcgtgagattacaaacgcttgattcaaagatgagtaaatgcaccatcaaaatgcttaaatggtacgtacctatccaagttaaatgtatatgaaatctattttaatgttcatcttgaaaattagaatattaatgttgtgtttctaatttcaatgcaggattaaattgcactcataagttatgatgattgattgatgtgtctttatttttttggtcgggattcaaaacgtttaaagatgtggcaagagttcagctttacgaaagatcactgtgtatgtatgtattatttgtgtttttcttctcccttcttgttttcacttttcactttcatataaattacgatccaatattctcaatcatttttacatcatctaacaaaggtgcataacatgtgtgtgatcaaaggtacataaaaatgacacaagcacatgaattttgtaaataggcaaagtaaccaataagggtcataacaagagtgtaaataattgaatgagaaaagaggagcccaaacatgttgtagcacaaactgcagtaccaaatgtagttggccactgacttatttgattcagcataaaagcataaacccaatctaagtgtagaagaagaaaaaaaaaaagagtttggctaagcccctatagccatttatccttcccaccggatgttgaaaggagataaataaagcccccctaactttgttgaacttctcttctggctacaaaaatagaagtgcgctttcttgacggcattgagatatcaaatgactcagtctgatatcctaaactccactcctaaaacgtctttcaccatctcatatgtcacaaatgcaatcgcaatcgatggtacaacctacagaagaaacacaaacaacacttcactttcttgagttcatcaaataagaagatcaagaaacggagttttgttatgaaacaaaccttcactgaattggggaccaaacccttgtacaatgctccaaagccttcatgacgaactgtttttctaaatgcatcgaccataccagtgtattcaagtgaagctgtgcttctcccttcgcctgttacaatagcggaagcatctttccacccgaccatttgcattctcctacgaatcacatccagtggataagcaattgtttgaccaactgttccagctattgcaccacaagtgagcctcgttacaaccgtcagctcattgttttctactagaccgtatgggttctctttaactagccagtcctttagagactcatacaccgaaaagttcaagcccacatatggaacctgcatttatcaaaagagtctcatcaactcataaatatttgtagtattacgttcgattgagtgaataaaaaaaaacacaagacttacaactccaatcactgatggaagccaaccacggtacaaggcccgtggaccttcctctcgcaggacagttgccaaagcatgggcaattcctctatattgataaggagaatttgcggtctgtgcacatatccatatttgcagagttacaaagatgagcaataaggctatagcaattacaaacttagggtacgaaaagctacctggacagttagccttccacgaaccatatccatcgggtacgttgcagacatggctattatcccagcggttgcaccagctccaagccgtaaaagaggagtaagttgggcattttctgcagaaatgacacaaacccatgaaccataaattcttacaaacaacgagccctattgtttgcaccatcaaatatggaaggctagtgatatcagttcaacatagctcaacttagaaacttaatttaaaggctgaagcgataggtaataataccatgcacagattcttcaacaggtaataataaaaatgttatgctgaaatcaatttaccatttccggtccgctgacgatacatgtacagtatgccactatgagagaaaaaagagaaaaagcatagattagaaaaagatctatagtatcaagtatgatgcctttattaagatcaagataacagagtacagagaagatatagatgtcttactttgaagcttgctcatagctgaaaaatttaacagccgaattaggaacaatacgagcacagttggtgccatttcctttgaacagtccacgaagtccctcggttctccaaatatgcttcaatccttggactgtcccactgtactttatattatgcggattttggacctagagattgacaacgaacaggttaactctccagtcatttatatgttccttaacaaaagctatcaacaaaggaaaaaacctgaagtaatatcttcatcctttccagaggtgcaacagcagttcgtgacctaatagaaacacgcattaagcgatgagaatgagcattgaatgtaacacaaaggctgaaagaaaaagtgactcttttacatgctaatcgagtaaagactgcgtttttctgctcctcttatccattggacataagcccgtatctatatttgactgcttcaacacgaatttcgatctcaacggaaaaaaaaaaaaaacaagtaacggactgatctctactacatttatcgtcagcattcagtaacaggatcaacaccaataaagttcagatttttcatgttaacccacgacaaaacatacaaaaacactgaaaaaaggacaactctataagttcttaaatctaattttgacgttctcaaacaaatgtatagtcagtccctactcatcatttcaggagatgtctcgttactaatcccaatattcattaaaattgataaaacaatgaaggaatgagaaaaaggactcacactccaccagcgacaccaccggcaaaaagagacttgcagatgcttttaaaagcataactcggagctttgactccttccctcgcttcctccgccagatttacgatcgttgacacagctgctgattctgttcttttcacatcctctgatgccatcgattgatagatacgattcaggttcaaaccggaatcagtgtaataccccacaccaacaacgattacgatccctagagatttcttcacaagtttttaattcgatctctcaacgaataacaaaaccctaagagaaatctccgattagaagtgaaaatggagaagagagatcaaagcacttctcgaaagcacaaatctaagcccctctttgtgttgtgtcccggcggcgatgataaaagccaaaagacacaacctactgattaagcctgaatcataacgacgccgttttaatggcacatttctgttgtgaaatatttgcaaaccaaccccttgacttaatcatgttttgtaaaatagcccttttacttcgaaatgtgcgaaattattcttcatttgattaaaaatctgcacgtcagcggtgaagttgagtgtgtggcgattagtagccgcatttgtgattttttctttttagtgatatttaattatgttcaacgtcacctatcttttaagttcttaaaaggttaaagatttaaacaattatacacttgatattatatttaagaggttaaggatttaaaaacaaaaaaaaacagttttaaaatgttgtacactcgaatttcgacactctcgttattcaattgttaaagaagttagtgtagaaaaaaaagttaagaattttaagtcaaggggtgtatgcagaaacaattgttagtttaaggatttgtttgcaaagttttcttatgatgtggtaccatcaggtgttatctaacgcgcgttactaagtgcgtaagatatactctctccatatatgtacgccacgtgataatggtacaactgtgttagtgcttgatcccgtttggtcagtatgatccatttgtttggttacttcttccagtctttgtaatactagtaagttttcgtaaccacatcaattttgggatcataaaaaaagttgaaatactttcacactacatacttcacagactgtaaattagttctatctatatttttatctaaatattgttgggcttaatatggaaggaacgacaaaaagataaaataattttcccaaaaaaattatttttgttaagtatagcggagagagattttaactttttccaagatgatatcgggtttgaatgataaccacaataataatagtatagctttgtataactttgaaagttaccaatcacaaaaactttatcaaaagtgttattaaaagttttatactcacctttttttaataatttctttgtatagttccttctaacagctttgcactattccgataaatctaacagctaaaaatcttgtataccttttggttaccaatcagacccatcatataatgtataagaaaattgcaactatgccatcaatcttgtttcttgtcttttcatgttttggagggtccatactcaaaacaacaaatcaatatcgagtttttatgtttagttatatacactatcattactttcaaaacaaagaaaaaagcctttaacaaaaaaacaagtgggtgtgtataaaagtagatgtcggaccacagttgataagaatcaaataccgaaagccttatggctattattctatgtgataattatgtagatcacacataaaaaaagttcaccagctcattactcatactcacttacatgatcaagttcaaattattaaaatgtaaaagtcttcatgtaaacaaatcgggccgttctaagcccatataatgaagcctgttatgcacctaaacaaatagggcccttttatcaattagggaaagaattacgggcctaaacagctcagaagttctgtcaattaaactctgtgtttccttagtctaataactaaccgataaaataggtagtaaaaaagtcaacgatagttatcccaaaaatgcaatgttaatatttttgtcaaatctgattggtgttggaaagtggactatctataaatccatctttaaatgatagacagagacacagagtagaagactttacagctgtacgtagctttttgtataaaccacaaaaatagtcagaaggcgacctacactatgtgatcatataacactccccatatatctttcaagtcttcgtttacgaggttaatatttttcaacgtttaggatccaggtttcttttagattcaagttgtgaattagaaaacaaacaaaagaagaagttttgagagcacgtcttctaacatggaagcattaaacttgacgtatttttatggactatattaatcgatatgctgggaggatgatgaaaaaataaagaatttatatataaatattagttatttaggtaagtatgaaagataaataatatataaaccaaaaaattttttttaaaaaaattaattacaaaaatgctattgaataaaaataattgtaatattcggatgataagtatataattatttgtttaatgttttaaaaactatgatatcgcgataagtttataaattatttgttaaaacatatttatcgatttaaaattgtaaatcagaattttttatttatgtatattcagcacaataaaaggaaattagacttttttatataattaacatgataataattataactacatgatatatagaatgataacatgctaatatattatataacagaataatatttatatgaaaacgttaagatattcgatacatgaataatgtttactgtaacggataatttatacataatatttactaataattgttaacgaggttaacctgatgataacaatgaaaatatttagtaacaaaacaatatatgagactttaattaaaaaaaagaaaaatacagaagaataataaagtaacttcattagttcttttactgttgaaatagtccacaattcctacacctaatttttcagtcttctgagcatataaagtgatattttcctatttttatttactttttaattgtattataataatatttgggtatttttggttattataataatatctgaaaatattattgatatttttggttatttttatatttttactaaaacaaccgaaccgatccgaatccgaaccaaaatcgaaccaagtttttagaatatctgaatggttctcaacctcttcatatccgaatagatttgatatccaaaaaagaaccaaacagatagggatacccgaatgaccagacctagtattattgatataaaaaaggttgctcaatgtataatttcatttgactagctggtctgttttcgtacaaacacactcacaaaagtacgaaaataggaagtcgtcttagttttagaaaataactattgctgcttattggcatatattgaaaaatcaaatactactagtaatcgtaagttctaaatttgaatgtttttttcccgagtaattgaattgttcttagtaattaagttcacaaatttggaaaattgcgatatctgagaacgtattaatttacctgtcggtaaacagtcacactcatgtttctagatttcgtatattttagtaataatttggttagtctccttatctgcgagtcaacgagacccggtccgctcaaccgtactacagtctaaattctagtttcacgcgcttacttacattacatacgcgctcatctcttctttactcaaaagttttaaaaaacgaatatcaaatcaacgctaacaaagtttgattttttgcttccatcttcttcccctccttaagttttcaaatctattcatcaaattttcttttgtctttcccttaagattcccgggaaagccaaggaaaaacgctagaagaaaattaacataataatgttaattgttgcttaaaccttccagctcaagtttggtagtaagtaagcagacatttaatcccccaagaagcaattgaagaagacttttaattcttctgaattttctttccaaaaacccctttttagaaaattggttgcatcatagagattggttcatttattcccaccggagaagatcatcaaattcgtcttctcacctatatcgccgacgacattcttcacggttcgtttgatttctacctgttggttcttcgttttatctgaattcaatcggagatatatgtttttgagttcgaatttgataaaaaatcgaaacttttttgatttgaatcgcagttggaaaaaaacaaagcaaaaccctagaaatagtggctgatgaggtcgcgaggcgatgtctctgaagcagaaggtacgagatcagatgctggttcttcaagaagcgaagaagaaacgagtctgaaggagaaacactcaaattcgcgagctgggtctcaaagatctggaaaaagcttgagaaatgacgagcctaattacggatcagattcttcatctaagaacacaagcagcagcaacaaccctattgagtatacagagcatgaacgagctgagcttttaagaaggttagattctatcaaagatcatctacttcgcggtggtggtggtggtaataatgtagttgataaacctaaagaaccagatcagaatcagcctttccttagaccagttcatcttcatggtcatgctaatcataatcctggtccttcttattaccatcagtatccagaacctattcaataccctggaccggttcatggaatgtatcctcaagcttatcaagatccttatgggtaccaaagaagaccacctccagttcctaatccaaactggtatcctcctggtcattaccctaatcagatggctcgtcagtatcctggaggtcaatatgttgaacttggtcctgatatagttgagccacattcttactatccagctactcctggtaggtacggtgacctgcctccgtatagcccggtttcgtctcaccatcgtgaagagaaactcgctacacagtacagtgatatgcctccgtatagcccggtttcgtctcaccatcgtggcgagaaactcacgacaccgtatagtccacgtgttaataacggttcgagttttccttcttcgatgggcactccaggtcctcgaggtggttatgcaaggtggccgagtgaacatgattctgaaatgggcggtgcttttgctcgtgggtatgttaagaaagctgtatcggatactggtgttcgacgttgtcatcctcttgctggtggtgctccttttatagcttgtcatagttgctttgagctgctttacttgcctaagaagaagcttttgtctcaggaaaggttacataagctgcagtgcggtgcttgttctgaagttattagtttcacaatcgttgataggaaactcgttttctcttctggtaatgaggaaacaaaaccggtctctctagaggttgaagatagaaacacaacaaacacagtagtgatagaggaggaagtctcttctgttgatttcaacagctcaggtagagatattccacgtaaggatgaagaagaaccagtgcaagaactgagaaatcatcaggatactattactacgcaaagcgtccgctctgaatctcaacactcagatgatgaagaaagatcgagcaattctagtgaacaacaacagaaggaggtcaaatctgttcgtcggcgaggtaaagggtcaaaagcacctgaacccgctgctcctgataatgccagtctccttgaactttttgagtattctaatgtaaacagagctgcactcgcttatggaatggcgcagttaggttatgaaaagccagataagcaaaagtctttcatgacacaggactcgctgaaaccagaatcagtagctacagagacagaggtttcttacaatggatactctaacaccgagatctcagaagattcaaggtactcaaacagaaagggtagtgagtacggttcgacagagatcacaacgaggtcctctactgatcaaaacgaagaccagatgaagtcattagaggtttgggttaatggacatcttataccagaagatcttgttagcagtgctgagaaattagctggaccaatccaagctggaaagtattggtacttccatgaacttcagcatccactgtttctctcttgtttttgtttttccctttactcagtttctgatacatgtctctgattcaggtatgattaccgagctgggttctggggagtgatgggcaaaccgtgtctcggtataatacctgtaagtaccttcacattgttctctcaagttgattattggaatggtgtcatcaaattgatgaagaaatggttgacttacttgttgttgttgcagccatttattgaagagtttagccatccaatgctggataactgcgctgcaggaaacacagacgtgtttgtgaatggaagagagcttcacaagagagatttcgagttacttgtgggtcgtggtctgcctagagacaagaaccgttcttacattgttgatatatcaggaagaatccttgatcaagattcaggagaagaacttcacagccttggcaaattagccccaacgtaagcagattcacacaaatgatttttattcttttgagattttgagatcacctaagattctaaagttttagtgtgttaaacttgaaacaggattgagaaagtgaagcatggatttggtatgagagttccaagatcattagcttcatgaaaactccccctagtaacaactacacaaccaaaatatgattctgcttcttgtttccatcttcatattatttatttgttaaacacaactgtaaagtgttttttacatcttgattttgatttttggtattctttttaaaatatctttggggaaatgtctgtatgttttttattgcgaccagaaccggtttaggggttatagactgtatacaaaccgggttctctcggtacaaggtttgtgctttgtattatttccatttttttatggaatgatattagtttgctcttaatgacttttttttttatctcttttattgctcttttgtaagttgtaacagaagcttcatcgataacatggtttactcctcctaattccttattatctctggtttaactaaatcgtttatttaaaccggttttggtttgtaggtttctttcatgtcagcaacaatatatgtaggtcattcgaccatactcaacaattcaattaaacaatgttctcctagctgatctttctttcttcatgattagcttctaggcttgatttgccctttcctcgagttctaggtgaattatggattgggattatctatctatcggttagttatccggtttcatctttctttccactaaaatgttcatattgtctgctaattcctctcttggctgatggactagtttttgcacgtttctgaagtgggtccttcctaaaatacaagacaacagattataacttactcatgggcccaatatcaatatcaatatcaaacaagaaagagaatctgttcttaacaggcctcgtggtccgttcgtttagttttcatgtttcaatatttcttagaaaaatacaaaattagagtaagaacaaaaagatactaactagtagcgagcatgagaaaaacgagtaagcagaagttgtccactaataataaaattgtgaggaatcaagaaattctcaatacaaaaaaattttagcaatgaagaaataaaataaaatattattagcaataattggagtcactagaatgtttcatatctctttatatactaacactagtgttagttcattcacgcaaatgttaaaaaccaattctaccattgttaaacttataccaaatatttaaactagttacctgcatcattctaataactaataagtctcatgaattcacaaacatagcaatgttttgaataacccaatatatcatcaaaaagtgtggtgcttccgtgtttgctaagttccaagattcaagagaaaggttgatattgttgtaacgaaaggctgtggagatacaagtataccacctaagttgagataaaaggtgtgaggaccaaaagcagggcatgtgcttcttcacataaattaaaagaaaaaaactcaagttattactaatatgtgattaataaacacaaggacaatgagaccatctgggctggtccaacatatttttggattcctcaagcaaagttgaaaaaaaaaaacttttctgaattttttaatcagaatttcactatcaaaagtcataattgtaaaaaacaaatcctgaaatattctttattccatttccaatatatattgctgtcacaaagaaatctacaaaaatatttgttataacttaaaagaatgcccaacaatttagcctataatcatatatgcttcttggacaaaaaaaaatcttggaacaacaatgctaattaaatttttctttttttttttcttacacagagctaattaactttttcttttttgttgactgtggttaacataattccagggtgatggtatattcaatgtcgcagtatattcaatgttgcatggtgtgtgaatagttgtactataatattccctcttttcatttttatttgatattttaggaaaaatacacatattaaaaaaaatatattaaaattgatattaaatatattatttttttgtgttttacaattttttattattttaaaccaatgattgaactattaaaatttacaatttattaataataactaataaatattgaatagaaaatttacaaaatcaatctttttaaaacaaatatttttccaaaaaaatcaaataaaaaggaacagaaaaaatataatatgacagttcgaaagtataattcaaatctgtaattgttacggttttgttattcttctttcttgtcgttgtttgtgacaaaattgtaatcaaatatattgtatatctcacaatggtgtgactttttaataccatatttttttgtaacgattgtatcactacaatttactacttgtcacaaattcatgacaatagtttttactgttacaaatatgtttctattgagacaaaatattttgtatcaataaaattactttttctgcagtaattaataaatagactgtctgaaattcacaaaattattattcctgcatttaataaaagtaaaaaagggtaacaaaacatcactttcatggtcacaaagatcctaaaagttaatctcaaacctaaccatctcattctcacgagtccaactataaaatcattgaatagcttccaccaaattcactgtgctctcttcttcaatggaacaacaattaaccttagtattgcttgatagcccaaaaggcgccaaatatgtagaaacctttgaagaagccgcttcttcttcttcttcttcttcttcttcttctgttccctcctgcactgatcaccgccatcgaaccttcgtcaaattcttcctttacttctctctcgtcgctcttgcttactatttcatcatctccagtctcgccgtctctccaattcccccaacattgccgcaatcttctcccggaaacggtaatctttctttcgcagttcgttgtccttcaatttcgaatttgatctttgataaagattcgagaatctttccaaatatggagattcaatgattgttgggttgggtttaattttggaaatttcgaagctttcgatcaaaacttgtaatttagggtttaaagtgtttgtgtttaccatgtatttgattaaatgtctatttgtgatttcatttttgtagtttcatcagcaaagtgtgatcttttcaccggagattggataccagatccaacaggtcctctgtacacaaatgtcacttgtcgtcacattcaagattttcagaactgcctattgaatggacgaccagatgtgaattatctcttctggagatggaagcctcgtgattgtgatcttcctaggtttagtccatcgcagtttcttgcttcagtgaagaacaaatggtgggcttttatcggtgattccattgctcgtaatcatgtccagtctctcatctgcattctctctcaggtttgttgattcttttattcagagaatgagtttggtttttgtgttaatgaaagtttccttagactacaagtaagtaatcaagacctttgatttaactgtctcaggtggaagaagtggaggaaatctatcacgataaggagttcagatccaagatatggagattcccttctcacaacttcacactatcagtcatttggtctcctttccttctcaaatccgaaacatctagcaactcggatattcagctttacctcgaccagcttgaccacaaatggactgtccaatacccgaaattcgactacgttgttatctctggaggcaaatggtttcttaaaacaacaattttccatgaaaacaacgtagtcacgggctgtcattactgccaaggaagaaacaacctaactgatctcggctatgattactcctaccgcaaaaccctaaaccttctccgtgacttcgtcctaaactcaacccacaaaccgctggttctgtttcgaacaacaacgcctgaccatttcgaaaacggagagtggaacactggtgggtattgcaacagaacgatgccgtttaaagaaggccaagcaaatatgaaaactgtagatgatgtgatgcgtgatgttgagcttgaggtgtttcagaaatttgggaaaggttttggcttaggttccaacatcaggctattagacacgactggaatgtctcttctccgtccagacgggcatccgggaccataccggcatccaaatccttttgctggagttaagaataagagcaatgttcagaatgattgtctgcattggtgcttacctggtccaattgattcatggaatgatgtgatggtggaaaccacgcttaaccgggaacgggaactatacgatttaaccggttaatgtaccacgatatcgcttgtagctagttacagtcaatagccattccacttgtcaatgtctcgtatatgatagttctatattttaattttgtaatggttctaaacaagaataaacgatgcaaaattttgcagtgtgaattttgtttaaggtgttgttctgtggaaagctaataatgatcttactaggacttgtgatgtaaaaacaaacttgtaatgtatgctctgcattttctttaatcagtagcttgttacacctgttatgtgactggagagaccaagtagggatcacaaactgaaaaaacgacttgggcttggaaagttaactttgcaccactacgaggacatgaatctagtctaaattcaaccatatcgataacaagaagcaagcagtgactgtaatagtatgctgaataaactatgtcaagaataaaagcatgcgacaagagcagctacaaacatttggatcagccgatatgtacttggaaggtggacgacaaactaaaattatgttgatcattataaaaatagagataaatgcgcattttgaatgaaagaaaaacatttttttaaaacctatgaattaaaacctatggtttttgtgatcatcatcatgagagcgtttgttcttaggtcagttgtagttgagtttcgtcttgttaattgggatgtttacattgatcttttgtctttttattgatgactgtttgtttatgttcatatatattatatagtgttgtcggctttgcctcgtgttgcttagtgtttcatgtctttaatgttcatgtagtctctctgttttgattttttttgtaatactctcttttcttgtaatccaagtcaacgacatcaataatatttctaaagtggacgaagaactcatcttgcaacaagtgagcactgaacttgaaatcagaaaagatgtaagttagagatcaatttatatgcaaagtattcactagtagcccatcgaggataactaaaatctgagatccgtgaacatgaaagattaaacatacatgtgtaaaaaggcacctacaccataatttgattgtcctgatcccttcttaccagtgacattaataaaacatttgaggctaatgaataaattaaaaacaccgtgccattctactttaccagacatagtcgtcataccgttttttgtagcttgtgcggatcgtccaataatcattgacagtcgtcactggtgacatatgccatacgatgaacattcggtaacttcagcaaatttggcagatatcgaaaacaaataatttgatttcacaatattgtgtaatttgttttttagtattggttgtatatatttctttggacatttggtagctatagcaactatttactcgtggaaataatttatttatttctgtatgaaattatgataacatatctgtttaaaagttgtattgatgcgacagcttttctttgatttaatgctaccttatacttgttcaaactggctgaaaaatacatacaaaattattaaattccaaccacttatcacactatcctttatgtgataataagtttagctgggcaatgttattcattaaaaattggtgatgcaacacaagtcgaattgacaaagatataataatgagttaataggctttatgatttagcgggacatggacatatattcaattttgtaaatcataacaaaaatgatgggctatgagataaattccactttcacttttcttcactcaaacaaatgctaaaaactaatctatcgatgaatgattatatgcctttttatcgtcgccactatgacctaaaatatttcaagaagtcaattttttaatttgtatagagcaaaatgttttgcaaataaaagaaaaacattgttatgaaagaaaataatacagtagaaactctataaattaatattcgataaattaataaacacgataaattaataaattttgtcggtctcaagtcgggtcaatgtaaaaattaaccaaaatcgataagataataagataataatctttttgaaatccctatgtaaaaatatgatcctaataatatcataaattaataatcataaatcttaagcatacattctaatactaattttatctaaaacttttattcaagccacaattacaactctttttagagtacagttggtatgatctcttttgtactcacataactccttacgtatttgatccgtcatatttggttttgtaacattttttaatcattgctaagatttgtgttaaaaaaaattggattaagcctcacgttaacgtcgtaaatatacggacacaatattttgtaaaaaaataaattaaaaagtcaagagaaaaataatttttaacataattgaatatacgaacaacaaaatataagaaaaattaaattaaaaaacatatttaaaagaatttaatattgtattttacgtaaaaaaatttataaatatttattaatttataggataaactaatatcactataaattaataaaattttatggtaccaatattattaatttatagaattttttatgtaatagcaaattaccattccaaaatttaatgttaatggtaaaaaaaaaaaaaaagagcgaaagaattttattttattatagctaagaaaattggggagaaaaatcattgcggaagcattacgtttgcatttcatcacatattcacacgtgcgctcaagacatttcacacgcacaaatataattgacccacaatcacaaaaaagctggtcatcactaatttttttcaacaatttccctacccctctccaataattgaaaattttatatatattcttttggcaaccatatttaataaacatatatatatatatatattggtttcaattatggatattatataatagcattattatgtataattcccaattttatgtaagttatgaatatattttacacagcttgttaaatgctttactttaaatctacatgaaaatcaaaatgtattaatatgtccacaatttaaatggttgatttcatattaacatgagaaatcacaaaataataagtataaaaatgaattacgtaaatgatgattttttagtttaaataatcggtcaccaaaatattcatattcgaacatggtcgccacaagcgacattctacaaaaaaaacacatacaagtaaatagaaaatagaatttctcctctcaatgattcacacaaactctctatataaagccattacttaataccacacaaattacaaaaaaaaaaagaaaaaaggagataataatcacaaactacaaaagtagaaagaagaaaaaagaacaaagtatcagttcttgaatatttgcatcaatggaggaatccaaaacacctcacgttgcgatcataccaagtccgggaatgggtcatctcataccactcgtcgagtttgctaaacgactcgtccatcttcacggcctcaccgttaccttcgtcatcgccggcgaaggtccaccatcaaaagctcagagaaccgtcctcgactctctcccttcttcaatctcctccgtctttctccctcctgttgatctcaccgatctctcttcgtccactcgcatcgaatctcggatctccctcaccgtgactcgttcaaacccggagctccggaaagtcttcgactcgttcgtggagggaggtcgtttgccaacggcgctcgtcgtcgatctcttcggtacggacgctttcgacgtggccgtagaatttcacgtgccaccgtatattttctacccaacaacggccaacgtcttgtcgttttttctccatttgcctaaactagacgaaacggtgtcgtgtgagttcagggaattaaccgaaccgcttatgcttcctggatgtgtaccggttgccgggaaagatttccttgacccggcccaagaccggaaagacgatgcatacaaatggcttctccataacaccaagaggtacaaagaagccgaaggtattcttgtgaataccttctttgagctagagccaaatgctataaaggccttgcaagaaccgggtcttgataaaccaccggtttatccggttggaccgttggttaacattggtaagcaagaggctaagcaaaccgaagagtctgaatgtttaaagtggttggataaccagccgctcggttcggttttatatgtgtcctttggtagtggcggtaccctcacatgtgagcagctcaatgagcttgctcttggtcttgcagatagtgagcaacggtttctttgggtcatacgaagtcctagtgggatcgctaattcgtcgtattttgattcacatagccaaacagatccattgacatttttaccaccgggatttttagagcggactaaaaaaagaggttttgtgatccctttttgggctccacaagcccaagtcttggcgcatccatccacgggaggatttttaactcattgtggatggaattcgactctagagagtgtagtaagcggtattccacttatagcatggccattatacgcagaacagaagatgaatgcggttttgttgagtgaagatattcgtgcggcacttaggccgcgtgccggggacgatgggttagttagaagagaagaggtggctagagtggtaaaaggattgatggaaggtgaagaaggcaaaggagtgaggaacaagatgaaggagttgaaggaagcagcttgtagggtgttgaaggatgatgggacttcgacaaaagcacttagtcttgtggccttaaagtggaaagcccacaaaaaagagttagagcaaaatggcaaccactaaatatttgatgttctaatatgatttgtataatcaacggtgggatttgtgcaaatgtgtttctgtatgtatatgtatgttctacttttctttgcttcgtttgtctcaacttttatttgtatatgtttttggcttttgattaattcgtagaagatgttgcaattaagatcagcttagaagaagatgttgcatatatagttaaatattgttcaagagaatcatcaattgtctatcgtcaatagttaaatatatatatggcttataaaaataacagtttgttcaagttctaaacatttgttgcaatctcaagagttacatatatagatcatcagtgagacacatagatttcaacaatatgtttgtttggtaatgagatacgttatgggtttttattgaagatcgtccgtttcgtggttatggatcagagattaaggaaaaactaaaagtctaaaacgtggatgaccaagaaaataagtgtgtgtgtgtggagtaggtgaaatagcgttaacgacaaatatacagaaaacatgtgtgggacctgaagacagcatgtcattttatgacttgtaaaacgacttccacttttgttttgttttgaagtaggttatttgccactttcatgtgtcaagtgtttaaggctttaagcagaaattaatgaaatatccacgtacaacatctacgacttagcttctagaaattactaggatggcaaaaaaataaatttaggcttggaaggcccaaatattcgtagcccacacaataaatggttcttgagagttaaatggtttgggatttaagaaagttttcttcttataacagagttggtaaatttaaaatacaacggaatataatcgaaacaatcagtgaaactatagagatatattgatcacttttcaatttttcatgacccaaaacctctcaatttctccagcggttcttcctgggatcctcccagctatcagttcccacctttcatcaaataataacacacaaaattcagcttttactatggtgttacaattaaattattttcctacgaaatagtattcattattagttaaaagatcaaacctgtcaccgacaagcttatgcattcgagagaccaaatcttcttcttcttgactcatgttcacaacttcccactcaagactactcacttctgttccttgtcatcaccaaaattcagatttctcattatatatagataagtataaaaaaacatggaaaaatgagaaaacgaaggtgtttaagttttcagcttaccttcagaagaagaagtaacgatggagttggtcttgggttgcttagtcctgcgatggttatccatgtcaaacggcaccgtattacaaagaagaagaagaaagaaactaagagagtactctgagagagtggtcgtattttgaaggttgcacacgaaccatcatttctatttatagcaactaaccaaatcaagtaaccaacggtccaacgggtttggtcggtttctatgttaaaggattttaatttactaaattggttttgttctcattaattatattaattattgttagctatctttgcaagttgcaagtttgcaaccaataaaaaccacaagtacccgtgacttcatttactccgttgtgatggcttggactggaacataagttgtataaatattgatacatgccgttaattaagatcattaataatcaacaacaattgttttcaaagcttttctgattgctattccagttcattcaatcagaaattatactccctttgttcataatagattgaaattttggatatattaagacaaaatcatttttaattattttaacattactttttgtatcaaacatttttcaatgcctaagaaaaacttacaaaactattgtcctcgtgtacgtttgtaaaacacaataatattttcaaccattcatgttttctcggcgagtttgtttcactaaactgattgttttcatcatttagcttaattgctaataacacataactttctataaattggattaataccatgaaaagaatagaatctacattatttaaattaaaacaatgatcccccaatcatgtctctttaatatttaagatatactataacgtgtccatcacaaaagtaaatgagtgtcactacgaaagatgaaaatgggttggatacttgcatcctcaatcatgcaaatttggtcctaaattggcttaaagccaaaaaaaacaaaaaacaaagtggtcctcgcagtaagcaacgtgtcgtgtgttcgttacaactgctttattggttcgggttattcaacactattacctgcaataaaatctagtaacaacttttttcatagtatatcgatcgttagatcatctatatatacataagaggacctataaataaacttacaagtccacgaagggaatatccccaaggcaagactatatttaattgccatccctagcaaactttcaacttaacctttttcagtgctaacaatatattctcagtaaattccgaatttaagtttggaatgaggaagagaaacgtatattctcagactaacacctgatttaattaatgtggtcttgttctttactaagttaatattatgagtgacacattaacactaaccgattttattaatggggtttgtcaattgtcatttggttcagtaagaagaaggagaaatatgtttttgtcgaagcgtcctcaagcttatcatttgatgcaatgcgtggtagagcaacatatatgtttgcgattaaaatggtaatctagagcaacatgtttcattacttaatgaaaaacggagtcaacacataaaaatatatcatcatacattgtcacaatatatacgtttagtggcttgccaatgaccatattttagaggatgcataaactttgatagataatttgttgcatgcaaaagctatctatagccatgtaatacttgtaaccatcggataaagaagtgttatatgcgagttgcaaaccatccatggtcatcattatattggcctgaagaacatctttaacaaaagataaaatgagtggattgaaccacatatggagattgatgaagatttcattctaaaaacatttcaaagccaagaactaatgggcatccactttttacatcaatgcaacactttttagatgagatgaagatttcattctaaacatttagttaaacgtctagtttaggcatccactttgttcatcaatgcaacactttatagatgccgattaacgcatagcacttaataaaggaaacatggattattctacacattggtttatgctaagtatatgtcacacttttcattaccccatttaacctttttgttatgtatagggaatccagaataagagaaagaaagagatctatcccacaagatccagtaatcacaagatatttggaaatttccccacaacttttatttcgtccaatacacccctcacacagcttctgatcccctttaacgcgatgacagactcttgtttgaactcaatggtggtataaagggagaaaaacaaaacaaagtccacttatctcagattcgacacaaagtagcatctaagttcgggagaaaaaacgagagaaaaaagaacaagttacaatattcgaccacttttgttcttctgtttgcaggaggacaaaaccagactaagtaacgagagagagactgttcttagctgttttcagggctgcgatggcatcggagaagatggaggcttcaagtcagggtactgtaaaagagttaagaaagacatcatattaataaacgataacagaaacccatgtacgaactcgtaaatcataaagatacttcttcaaggatcaacggaggtccaaattataattataaacagcttaaaggtttctttatttcccaccaaaagagcctctttatgagaaagtagaaacattaccgatgcatatggagagagaggtcttgaatgaggttttggtttggcttctgtttcggttggttctgtgattacttgtgcagcgactgcagcttcaatcgctggcactggcactggctctggcactggctctggctcaggtactggtttatctacagtggttgttgtagctgcaactgtttctggctcaggtactggtttatcgactgtggtggttgtagctgtagctgattctgcttctgctgttactgttgctggtgctgggagagctttgttgcttgttgattgaggaagaagagcctttcctatttcctgttattccacgtagagttatttctataaagggttttattactaatggagatatgtatctaaattagttacctttaactcatcaacaagttctttaggggcaacctttgtgttcaagaactcatccacctgttttagagtttgctttcggtcctgtagagagtatagaaaagtaaccatcaaaacatcaccaattgcgataaatacattcaaactgaatcttgatgaatgaaaagatgggaagaacttgcctcagcaaatagaagtttcttgcctgcaagttgaacaagtgcagctgaacctagtagttggagtatggtttcaatctgtagggatgatgatagatataagattaataccggaattttctggagacaataagagggataataccgaaagactgacctctgtaaatgcaaaaacacttaatccagcagcagcagctactccaagagcgacagatacaccatcagaactctcctgtacatttatgttaaatcattgttcgatgtttgttacagaaacttaaattaaatgaatgtaaaattggatactcacaccaaatacaccgctgatgctatccgtcaaactgcttaaatcaaggctgagagtcttctttggctctatccaaggcaagctgctattctgcaaaccagatatataatgacaaatgtaaataagtcgaatcgaaaggatttgttgaagaaggacacattgtgggataagaggaaagggaacacacaccaaccagcctctaggtccctctgcaccatctttaatcgcataagcagatttgaatccattaagagccaccaattcagcaacaagctcagagtttccatcaaacctggctttccattcaaagagttagactgtattaacaacaatgtgtgcaatctaaaatgcttttcaatttctctcccattgcaatattctatcagatgtacaataacacttatgattatcactactcaagtttgaatattcttccacaaagcaaacaatcacaggttcatagataatgaaggaatgctgagactataattattcagtgatcagacaatataagctactcaatgtaactataagcctcaatattataactttcaatatattttgtaagattccaagagccttacttgtccagaatgtataatgtggtgttctcaggatctttaaacttcaaagaaagcttcttcaggaaaccaggcttgtcttcaccgttataaacagtagaaaccgcttttttacccaaacccttaatattaggactgcccacttgtctgaaatcagcagtagctcttatgtcaagcaactgagcattatcatcagtacccaacttggtataagcattcttagcagactcaactccccatgatttgggcttcttgttcagaacctgagacagaacaaatggaacagccaatgcagcaactccaccggcaataaccaaaggattgtctgtgacaaaattggatatcccttcaatcagaccatccgaatcaaaagatgaagaagtggtcatagattgttgcagagcttcctcgtacgtcagggatttagcaggagctgttgcactgcttagaacagaagttagaagagccaatccaccattgaatctcttcaagaagctttcttgggagattggtctctgtgattttggtggaaagaggttagggagcgagaaaggctttcgtggttctgatcttttctcggataacaccgacatagggctaaaagttgcggttttcagagcttccatgactctctctctctcagattctccttctacaccaagaattgtccactccgtatcatcaaacttttcccaacgattaaagatgatgaagaagaagtggaagaaaagtgtcaaggacaagagcattgagccgtttctagagagctgacgtggactgtgtaatcaatcctagccaccgcttgcttgacacgtggaatattcggatgagatacctcttgatcatgttttggtgtagaggactaaagcatagtgacttacttagtccgaaattgcatgtcaaatgtgtggccagagaatattgaagatgcttcaagagaagcctctgcatatttaccaaaatgtcctttatctagaacacaaagaacagagactagactagatacaaaaggttcctcagcatttgatttaagtgaacaaagaggatcaagtataacattaagaaaacataacatgatgcaatgtatggaacttacaatagatcaaagaaataatctaaaccttgtccgatttcccagattgaaatgccgattccccagagacgagcattctcaagccgtagaaggattgacatcaatgtaggatagaaaacagcatgcttgatgttcttatcatctctatacatgaaaagatgttcgccgctctctttatcccaacggaaagttggcttgtgtttctggagtaatgcgaggtaatcccttccggtgattgctcctccacctcctgaatcttgcgcaaaagaaaacagtttatgtcagttggttttgaaagaaaggcgggaagagaacaagttgcttatataagcttggatgctttatatacctccagagattacaaaatcgttgccgtaaaagttgataccaagaagaaccttcctggctatgtttgagtctatgttgttggatgacccaagcaggagcttgagagttaaatctatccacttgacaggagcattggggccagggttctggggatttgagaaatcataggtcataagagagaacccatcaaccgaatctttcaagaattgaagatcttctggcccaaaatcgtacatttggagcttctctgaacgaggcggaccaacgacatacatgaactgcatatgttgctggttgtttcttggtgagctcgttgagtgaagagcgtctccaagttgttttacgaatttcagtgcctagaagatttataaaaaagcttgctgacatgatgcattatgtggaaaaaaaatcgcagcggcctggaagagattacagggcataccattttccgcaaatcagggtcatgcaaaacgccataagctgcccaccttgaccaagactctaacacgataccattgtattccatttccctagagttcaaggcaaacatgatgacaaggtaagtgttaaaattcacaagctctaatgtaaagaaattcatccttttcagagcatgaaatatacaggaattgtagagctttgggagacccttacttgcactctgtgacaataagactgatagctttctctcttagtttttttttgttaagcatctccccaggaattgcttctagaacaactcttggtaatatctacataaaaggggaaaaaagtccagacaatcaaagaaggaaaaacaagttaaacatcagcattttccgggtaccgatctctggccaattcagagaaggaagaaaaataggtgtgctggttaaactaccagtgcattgcctcttgaccgaagctcttgaatccatcccttatcagcattatgtctcccttccaaaaccaatccagacccttggctaccagaaacagaaaccaaaaatgtcactactattttgtggaaaccatgagataattgcaggaacttagaactcattaacaaatgtatacaatatacctcttcaggtcgtaccataccggcgataaatgtgtaaactttgagttgaatatctttgccatatcatagcctttagagttcctacacagcatttttagcatatgaatccaatccctactgccctcagtgacaacaatttgtatattttcaatatctcaaatctaaaaatgttccaaagaaaccaaccatggagtaatgtaagctaacactggataatcatagtgcctagttgaattctctgaagccttggaatgttcctgaaacaaattcaaaccaaatttaatgaaaattcatcctaaagttttcagcttttcttctttgaattgcaacattgacccaaaactatggaactcacagtgaggatttcttggaaattaatatcagttttaacgattcccttttgacgtattgatgattccgtttggatgactcgatcagcgaatttgactttgtacacagcaatcgaaacggcgggaatcacaatgaagaagattacgaaaatggtgatgagtctccgatctgaatcttgttgtacgacttgacacagtgactcgtatccgtcgttccgccgtttcaaactctccgccgccgatgaacgtcgcctcctcgccatcgagtttctcaccagtgaaacagagaacgaaacaacatcgttagaactaggagatttttggaatgatgttaattccatatttacccctgcttctggtcaaatattacgttaaagaccaataagaggatatcagagagatggacacatcattctggaaaaaagaagagggttttatgacttttatcgttaaaccccaatccaaatcttcgcgaccagaaacagattcttctgcagaacctcttactagattgaaccgaagggataaggtaagatttttttatttcctggaatcaatttttcgtcggagaatacttattaggagttatcaatttacaggcttggagtctcagaaatggagcccaagcttctgctttctgcacataaacctttgtttgtctcttgtaactctccattcaatgaaaaaaccaagctttcggtcaaatccggtttgcccatgtccacaattcgagctgcgaggtctcagtttatgggggaaggtttgattttggggaacaagtatgggttttggagtacttctaggaaaactcgtgttgttgttgagcctgtgagagctgctgtgaagagaaggaaagagcttactttcgatagcgttgttcaaagggataagaaacttaagttagtgttgaacattaggaagattcttgtgagtcaacctgataggatgatgtctcttaggggtttgggtaagtacaggagagatttgggtttgaagaaacgtcgtcggtttatagctctgcttaggaaatatcctggtgtgtttgagatagttgaagaaggagcttattctttgagatttaagatgacatcagaggctgaaaggttgtaccttgacgaaatgaggattaggaatgagcttgaagatgtactggttgttaagctgaggaaactggtgatgatgtctattgataagcggatattgttggagaagatttcccatttgaagactgatttagggcttccgttagagttccgcgacacgatttgtcagcgttacccgcaatatttccgtgtggttcctacgcctagaggtccggctttagagttgactcactgggatcctgagcttgcagtgtcagctgctgagttatctgaggatgataataggactagagagtcagaagaaaggaatttgattattgatagaccacctaagttcaacagggttaagcttccaaggggtctcaatctttcaaagagtgagacgaggaagatatctcagttccgtgacatgcagtatatatctccttacaaggatttctcccacttgaggtcgggaacactcgagaaagaaaagcatgcttgtggggttattcatgagcttttgagcttaacgactgagaaaagaacgctggtggatcacttgactcatttccgtgaggaattcagattctcacaacaactgaggggaatgcttattaggcaccctgatctcttctacgtgtctttgaaaggtgaaagagactcggtgttcttaagagaagcttacaggaactctgaattgatagataaagatcctttaactcttgtgaaagagaagatgcgtgcacttgtttctgtaccaaggttcccaaggagaggaggacccaggaaagacgaagaaggaagagaggtagagatcgatggaagcgatgcagatggtgaggaggaagaagaagaaagtgatgctgaagaatggtctgatgttgatggttacttggaaggtgaagatggtggcaatgatgatgatggcgattggacagatgacgaaggagaggaagatgtgcctcctaactttgatgatgatgatgaagacgaagaagaagatagcgtgaagattggattaagtccttcaagtagaaaatcaagtagtcctagaaagaaagaagagaaagtacttactcctgtgttccctgatggtactccaagggaaaaatggtaaactatcacagattagtttcatgaaaaaatgtttacttgtcttgtatcattcttgaagatgaacactaatagctcaagcttatgtaagttgctgcttttgttgtaagaacacttgagaatgatgttgaatctttctcaactttttgtagtgtttagatgagtaatttgctatcttctgctagtgaatcttcttcaaacatataaaacgctgcgtttctgagatcgtagtgaaaataccaataaaacggatagtgtcctcttatccggaaactgtgaagtgaataaaatggagaacttctcttcaacttaccgccattgttacagctccttgtttcttcatcactcgcagcgaagatatctaggtaaccattcattttcttgttcttctctggaaatcaaacatgagtcgtttgaatctataccattctcaatatctctggaaccgtcgtctccaagttgggatttttatccgttgaagaagctaaatggatgcaaaaatctggtttctgttaaagctactcatgctcggatgatgaagttattcgatcgattcgaattggagttcatcgctaagagcttgatcactcgttaccttgaatttcaagaatttggatatgctagtactgtgttcttcatggggttccctcggaatcaagtttcatggagggattttttggaaaaggctgagaatttcggagtagaaaagtatagggtcttagaggaatttgttcagctacagaacaaaggagtaaattttgatgaagtagttctcgctatggttttgagaatttgtgctgttctaatgtatcggtttctgggtttaactatccatggtggtttgatcaagagagggcttgataattcagacacacgagtggtttctgcgtcgatgggtttttatggaagatgtgtgagtttgggttttgctaacaagttattcgatgaaatgcctaaaagagatgatcttgcatggaacgagatcgtaatggtaaacttgcggagtgggaattgggaaaaggctgtggaacttttcagagagatgcagttttctggtgctaaagcttatgatagcacaatggttaagcttttgcaagtttgtagcaataaggaaggttttgcagaagggagacagattcatgggtatgttctgagactcgggcttgaatcaaatgtgtctatgtgtaactctttgattgtcatgtattcgaggaatggcaagcttgaattatccaggaaagtttttaactcgatgaaagaccggaatttgtcttcgtggaactcgattttatcgagttatacgaaacttggttatgtagatgatgctatcggtctcctggacgagatggagatatgtggtctgaagccagatatagtgacatggaactctcttttgtcaggttatgcttctaaaggcttatccaaagatgccattgctgtattgaagagaatgcaaattgctggtctgaagccaagcacgagctcaattagtagtcttcttcaagctgtagctgaaccggggcatcttaaacttgggaaagcgatccacggatacatattaagaaatcagctttggtacgatgtgtatgtagaaaccaccttgatcgacatgtatattaaaactggctacttgccttacgcccggatggtttttgatatgatggatgcgaagaacattgttgcttggaattc

SEQ ID NO: 508 - DNA, 35259 bp, Arabidopsis thaliana
gaattcttttttaactatgaaacaaattatagaactactaagtaaagttctttaacagaaaaaaaaaaaaaactattaagtaaagttatatgaaacatttgttttttgaaattgtaggtatagaatatactgtttttctcggtggaagggattagtaatatatatatatatatatatatttatatgtaactgtgatgatgtatataccacatatgaatgatgtttctatatgtattaagttattaactatatatttgttataaactatgcgggggcatgctaatagtatatatttctaaagatattaactattaggtaaatgatatacgggtatgtcaaactacaaaaaaaaaaatacaactaaatactaggaaatataaaactaacaccactactcagtaaagtttagtggtgtcaaaaaattataattaatttctcaatatgttagatttatttaagtcacgactaaataatggtaattaaagacataaaattaaattaataatatgaaaattagttttttcttttcttatacaactaaatctcatacaaatactcttctaaatttaaaacagtactataagtttataacacaacagcttcactaataagctacccaccccggtccataactgagtttgtcgtcaacttttcttattatatttatcgactatatatgtagcactaatcgaattaaaaattgttgttttgctcacgttgttaattacgagttcagtgtaatcattttaacaaaaattaaagaaatggataaaacccaatcatttcatcaaatgaaagcaaagttgcctttgtaccgaacaattgaattaatatttcccccaaaaagaagcaaaattataatttaaaacatactttcactatctctataaacttataaggtatacgacacattgtaaattgacaagtacaccaaattcttttctgtttaagatttattaatatgtaagcttactgatgataagataattagatttcctttttcgtaaataccagattttataagcccaattggagccaaacagcaaaaaattaaaattaaaatatgttcgtaatgtcataataaactataaaaaatacagttttttttagaaaagttttatcaaccaaactccgatggtttcagatgacctccttatttttttttttttttggttccatacttccagattaaccacataataaaaaaataaaaaataaactttactactacttgcatcaaaacaaattacccaactttatattgaaagacattcaaataacacatgaataatgtttcttccactggtcacatagttgattttttttttgaatataagaactgtaaatatcatttcaaaaaatgaaagtttaggatttaattggtccgagaaatttttgtaaaaaacatgaaagcatagacattcgaggattaaatcatcaacgaaaaccataagcggtgaagcttatggcaaggctacatttgaagtttttttgttatcacacatcctgaagctaattgacaataaacttgttgccacctgccaaataaaatgttttaattttgcaagaaaaaagattttcccaattatacttttaaaagcattaaagttttgtctccaactataatattcagaaggtaaaactcacgtaatagagcaaaccattaatatgatttaacagtaaatttcccaaatccagtgaaatgccatgtactgtatagttatcatgtctatataagtgtaagctaaataccccacccacgagtaaaatgtgtatctgtcatatccaaaacctattcactcccaccaaaatatatcatagatcgcacaactgaaaaacgtatttgatttgagaaaaatttttatccataaactattcactcccacaatctctgacttccagtagtggagagggagactctgaacgcctctaagtgagaaaataaatacagtattatgtttttcaaataaacatcgatagataaaagacattagtgtggtgtgttttcgttggcacttcgacagtcaattaagaaaatgggaccaggtcattctttggagagctgaatagtagaaaatggtttcgtctaattaatctgttatttgttgtaagaaaaacgaaataaatgaaacaatattgataaataatctaaaacttttagaaagtaaaccaatgatcactcaatgtagtgatcatttacggtgagaatatatattactttcaattaatgtgctaaataacaaggtacttgtaggttttatctaaccatgattcgaatcagataccttcttcagctcaagccattcagctgtattgtactagattattgggacctcttgatggtgatcgagaactaaatgttggcaatgtggatatggtacaaaaaaggttaagatgccatttgaatcttctaatacggttgtttgattatgacctttgagagaagcttctagctgtagagatctcttgacaggaggtgagtgtcttttgagagaatctttcacgtagccatgtgtgatgtgtcacacagtgtgagttcctgtaaacggcaaattattcctcaaactttacttatgatatattcgtttagttctaacaaaaattatacgatagtggcatataaccttaacaactatccaaaaaaaaaaaggatatacaaagcaatttttgtgtgtgtctttactctttagttccatcttcacatactctaaaacgtttcgaattgtatttacttctcttgttcttcgtcttcctcattaccaaaacatatcttgtcgactttactttactttatgatttattatagcctataggtcactattttctacaacaatataatatttttttcatatttttttatttatttgttacacgctttactacattttcttttgccgtctgggtgccatatatatagttgcagaacactaagagtctaatcaactacatgattcaagcaaaccggcgctcaagcccacaactaaagcaaaaaacatagaaaaccaccatctactacattattgtttgggttatgaatttctgttactcttttattagtctaatattttatatattcttcatcagttgatgactttctaatatgtacattttgagcaataaagctcctccagtgtatattaaaaggcccaacaccatccctaatttgcttttcatgtctagcttctctatcctgtgcccaaagaaatgcgttttagtgtgaatttacttttctaggttagaattgaaattctacaatcctggacattttatttagttaaaagaatactagagccataatgatgtcaagaaagaaaagaatactagagtctagtgccataacaaatctaaccgtatatatgcgtcatgctcataaaagcacatgctaacgtagctgcctcatgtgtacgattgcctcagtaggaagaaatactgagtcaaaattgccttaaactaggaaaagatacaacatatatatttttttccccacaggaaaatacaacatattatattaagagtttaggctcaaattagaaaataacaaacccaataaagagcactgaagtttatatataaaaaagaaaaaaagaaaaaaaaaacaagaacaagagaactgaaattttttgagcgttagttttgatcttgtttactgatgcataacatctttggttataaacattgatttttggaaacttcgggtaatccgaatccaaacccgaaatatccgatccgaacccgatccgaatctcaaatcttaaaatacccgaataggttttatacttctaaatctaaaaatccgaaaatccgaaaaacctgatccgaacctaaacggatatccgaacgcccagacctacactaaattatcaatcttctaagaaccgaaggagtatattttaattgtaaattttcaaaagaagaagtacaaatacaaggcccaagccgaccacaggcccaaaaacacaaaatacaaggatgtccaactacaacaagaagagaataaagcgacctggaaaatacaaaaacagcaccagaaacttactttgcctgaaacaaagaaaaccacgtagccaaaagtgaagaaccaagaaaagcagaagattgtgccctgtaaaaggggtcaagacgagctctgagaatcaattggatctcctttgtgataagagcaggagatgtactgatgtagagttgtcacttgtcagaatgaatccgcagattgcgctccctccaaatacggtacatggaggctcgaagatgagtttgatgattagcgaaatatttgataccatgagtttgcttcttccacattctaccaaaacattttttttgtcgaatttactttacttgtatatgaattttaataggtcactattttctacaacgatgtgacatttgtttctactaatcgtttaattttttatgttattttttgctactcttactacattttcttttgccgtctgagtatatacttacataaccctaatagcccaaccaactacataatgagcaaactggcccaagcccacaataactaaagtgaaagattgaaaaccagctgattaatctgcatatttatttggtttgggttatgatatcctcttactctttttatatttattattctaatattttctattatttatcgatgatgagtttcttctatttgcacattgtgagttaattaataaagctcctccaactccaatgcatattaaaatgcccaacagcacccttagtttgcttttcatgtttagcttatctgtcctacgcttagaagaaatgggttttaatttagtgtaaatttaattttatatgtcataattgaaatactactatactaaaaacattcattttcaaaaaaaaaagatttttttttcatttaagaaaaaatgcaaccgtatgcgtcatgttaataaatacacatgctaacgaagctgatgggtgcacaaaaaaaaacgaagctgataagaaacactgagacaaacttgccctaagatagaaaatatacatattctaaattaagagttatggctaaaattaaggaagatacgaacctaataagagcactgaagtaaaagactaaaagagtaaaaaagatcaaacagagattcttgagagtaaatttctatcttgttctcctttagaaaaagtaatgaaatttgtttttaacgttaatcttcttctttttttgataaaaagtttctaacgttaatcattttgtaaatatatattgattgataagaaaaattaatgattataatagttttgatgtggctaaagaaaacctaagtattaatactttaatataactcaatttagtcacgtaattaggagttcgctggtcaataaagagtcaatgtaaacacccctttttacgtcctttctatattcaaaaaaaaagagtatacataaatcataatgcatatgtctccttcaatcacttttgttgtttaaaatatatttaaagtaataaaattatttataatacaaaagtatttttgaaatgtttgagccaaagcgctgcttaatagttagtatataatctttaacaaactaatgaaagttgtatgaaaacttatgtattaagagtaagctaaaataaagtgtatttctcactaatctaagtaaagtgactgtacaaggtatttatacaagtatagtatctaagtgactaactaactatacagtatctatatatccagtatgtataaacactatctccaatattatctgctcattgaatttgaatgtttatgcatcttaatcaactatagattataaataagagttcagtaagtgtaagattaataccttaagagaggtttagtcaaagaatagtaattcatttttttggatgtaaagaatattaattcatgcttttggattgtgcttaattacgtctgccatgtcatgattttatctttttgtatattgttgatttgatcgggtgcgttttctttttttaacggtttctttgttcagcttatttagggtttagttttctatttgttcctttagttaatctttctaattcttgtttgtgtccacgtgtattttattgtgttttatgtacttgttgtttagctttcgatatcgatattcaaaactcgagttatcataaactagatttttttcacgaaatattatactaccacatgcgtgaatattattttttcctttttttgaatactaagaaattctgggtcgaaacccgtaatcactccagccctgaaaccacagcatataatattaatttcctttcaagcgtcatttaaactggcacctctaagcttcgcctagactctttacatgcgtaatttaaacaattttattacttcaaaatatcattttacttttttatatgaaattcggtatgtcttccaaaccattatgtacaccgtttggagagagagacgtggacggcgtcatggagaaccactacacacttcagaaaaacttataggatagattgataaactggttcaaaatcaactcacaaccattcgatgcttgggagatcaacgatatgacacggtttttcaagtctggctccatgcttgagtctgactctattttaaacctttagaacaccttaaaaatttgaaagtattttttatttcttttcgattaaccgttacactagttctaaaaacgttatttttttaaaatgacgcgggaagaagctagtcatgattacacattccaaagcgcagttggggatgtttaaatagtaattttacaatttcctcggtggccattattttatcatgattcctgacatcatttttcgccataacaatttcctcagtgaccattatttttcttttctgaatcagtattaactttaatgcatagaagggaagaccatgcatgctttatagagagccttttttgtcacttggtatagacttttgtaatgtaacgacacacgccattatatatacttaacaattttctcgacttgcatgtacaccagtgagtgagagtcttatattatattgttaatctttgtttggatccaaaatatttttgaagtgctttcactcgtgtgtgtgccattcctccgcactcagcagtattgtaaagaaaaagccaatcaataccaacttttttttttgctacaataatttataataataaagagtttaaacgagtctgaatataaaagaaaataaagaaagactttaataaagtataaatttacattatgaaaataaaataaagggagaagaaggataaggcattgaggctagcagcctataagtgcctttaaagaaaaactattgtttgtttttttctcttaaatcaatactttatttattttctctcttctcccccaaagagaagcattgttttaagcttacaacagatgagatataattgctatgaagtgtgacaattgttctaaatagtggatcaaataagtagaaatataaataatgaaactttggtgaagcagatattgttgattgaatcttgttaatgaggtttgggatactttagaaaaaacattgtttgatttattctgcaaggatttcaggaaatatttcagatttcagataattaataacgtctgaaaatgatattcattaaaaaacattcgacaaatatttcagctacacgacaaattgggaccagctcatcgcactgcttcacaacacaagcactccttaactcaatctctttctgttttcatatgtcttccaagctaccctctacaaaattggcgtgagggaatgcaagacgacacggggagcttccatcttcaacactgctaatcaaactaattgacaaaaccgtctggaaccgcatcagctcaatcaaagtctcaaacaaccatcgctatgacctaaggctatagttctccaccgatcaacaccttaaaacccgactgctttgtttcttcaaattctatgttctgattcctcaaattctgaagcatagtattgcatccagtgtacaaaggttttttttgttgaaaacgtgtttacattcaattcaaaaaacattcataaaaaggattcaaattgacggtttaatgaaagtatgttaccgaattaccgattatgaccagcatagatcagattacgctgcaacaaaagtaaaatcttagtccgtctaacatgcacatatatttgtattttcctattaaaataaatcagaggaatgatcaatgttttttttcttggttaaaaagaattaatctatatatgtttcatatacattaaatcaagtgtacttttatttttatttttaaatgaaaacaactttttcaatatgaaatatctaacactttgattattgaatatgcatattagaaagcatacgatgaaatatcaagaaataaaacaatgttgcagatataagtatgacatgactatataattaggtaaaggcaggtccacgttgtttgatccaccatataccaaccgttataaaataataatgaaaagggtactgtaaatatttagtatatcaaacgttgttaaagaaaaaacaaatcacaacaactaaaattcaaacaacatagtaactaaaattcaatttgtttagtatatattaagcgactgatcagaaagaaaacaactattttttataaagagatttaatgttcccaaaaataagcgattggaagaagaaaaaggtagcaataatttattaaccatcaagagacaaaaattatcttaatcaaatgcgtttaaccattcccagtcccacaatcatgttaatactagtaatggtaattactaattatcatatgatcaatggtgcccattttccatcgtaattagtaaattaactatttgttaatcactaatcagacctccccctctccctaacttggagtattatttatctattctctagcaacttggtcgactagtgaagcatagaaacaacgttgatacatttatatatatcctactaaaaagaatataataaaatgaagtattattgaaagaacgaatttctacatatatattttgaatttgtgtatatatgatacactctgggtggaagagagtacgtagctcagctttctactattagcctttagaaatctaattaaggttttagcataatcttttgtttgtttttgttcattgaggtaggaaatatctatctaacttattatcaataaacttataaaccaaaatcagcgaaagcagaaaaaagaattatttggcgtactatcatattttagagggcgtcttaactcttaacttctaaagttttgagataattaaagtatgtttttaaactttaatttggcttattaaacatagacatttcttttgatgatttagctttatctcactttaattcttaggaatgatgagcttggactctattatttaaaatacatcaaatgtataaagatttcgatacaaactaacttaaaccagagtaaataaaccatacacaataagcaacttgtgcttcatttgcacctaaccgatacctgagtacccgaaacattcgaactattggtgatcgtggttacgatgagcttctccaaacctggtcagaaacctaaccaaaactcaatcttattgcatcaactccgcgctctctgttttcttcaactttttctcaaacactcaaaattagaagcatttgattgcaaaggagatttttttattattgcaataaaagttttacattgcaaaacaaaaaaaagggaaagaaaagaaaaagcaaaaaaaaaaaaacatgtgactagttttttgaaccgttgttagactagtccatgtaattttcaccggtcaatggttttactaaataatgtacgaagtgaagaagaagaaaaaaaaaaaagtctaatcttatcaaggagtcattggaacaaccataagatgaccctttttgtattgttcatcatcatcttcttcttgatcatcttcattaaaacgacaaggtaacttcttttcacactcttctttcattagcctgacttttcccaacaagaatatgtatagtccgaagattacaaccccagatccgacaacactatccacatcaaaaagaaaatcgatcacattcagatttttatgatatatgtgtataaatacaattcgacgtaccttcctaggaaaatttgacgatgaaggatcaagaaatcaaatagtgttgcaaatataagccccaccggggtaaatatagaagtaaagataggtcctctctttctgatgcaccaagacgttccaaccgtacatattccttgtgctactgctccctataacacgttgtgatagacataggtccgtataacttaattatattttactagaagttataaaattaaacaaatactgccaactttttcagtaatactaaaaacacttaccgcgtaaacaatggtaacgatatcaagtttatctgtgaggatccaagccgtgatatctcgagatttgatgaggcttagaagggcgcattggatggtgccaaagaaggataatacgacagtactcgagtattgacaagggtatttctcgttcactttggcttgtatcagcatccacgacccgaaacagctactacccgcaaagagaagtacgcatcctattatccaattctctggtttcatagcgtggttattgtttatcaactgatgggtttctagtttccgaagttttgtcaagggaacacctttgtacattgttaataataaagctcctcctatgcatatcaacgcgcccatcaccatccccatacctgctttgcttttcatgtttagcttctctaccctacacccaaagaattgtgtttacatattatcataataaacttagtttgtctagtaataattgaattaatattagacacttatagtttacctgaatattagagccataacgaatgtaatcgcaggcgtcatgctaataaaagcacatgccaacgtagccgatgtgtatgatagccccaataggaagaaatactgagtcaaacttgccctaaaatatgttcagaatgatcatatatttcagtacaaaataaagctcttaatttgactaaaaaccagtggttatttttatgctttcatgtttttatcttttttgccacggaccgtaaacctatcatgtttcattttttataaaatatttacattcttaacaataaaaaaacaaaagaaaaagactaaaaatcggttagaatgcaacaacaggacaattacgcaaacattcaaaattctatatcaattagaagaaattgtctatatttctaaaaagtaaaaactaattaagtaatagaaaatttaaattctaaaacctaaacgctaaaagcttaaccataacttcgaaatccaaaatcctaactcttaaatattaaattcttcatccaaaaatctaaacaaaatggtttattttcttaaatttcaaacagtcaacctatttttatttagaatatttccttattattcctacaactattaggagttccaagcgaaaattagaaaaagaacgaacccaacaagagcactgaagaaaagctgaaccaagatgttgagcgttagtgtcggtctcgttttcctaaaaaacatataacgaatcatttttaacgttaattattacaaacatatatatatcatcaagaccaaagttctttaatgaatataatatacttaccgttcccaaaaaaatgcgattggtgccaaaaatagggttgaaatagcaagacgatatgttgcgataaccatatggttaacaccaccatcgagtacttttttaaccaaagcattagctaaacccagcgctgaattgatcataaccataataatcaccggtgtccatttaccatcgcagtaacccattattgattactagtcgactgctaaccaaaaaaaagtaaatacgaagtaattacacttattatgaataagttaataactaatctctctcttctttttgtattctttttgtttctctaaggggtttgtgtatatgaatgattgaaggcagaagaaacttgtatatatagagactttgttcactagtcatatatatatattttttaaattttatttaattttagaataaagtacgaatttataaaactaaagcttcttctgtttctcttttgattgccacaagtttctcgatgaattagacagatcatgacattgacgtagatgatgaccattttttttaaaagaatatttatctcttctggtaaccgctagttcatatgcttcatgcagtgcgttaattctttactaaagtgaaactatacatcttcaagaaagatgaaacaagtatacattctatttttatacgaacagaacaaactataatggtaagttgagttctaactttgctatccctcacgtttaattattcttattctgttatctacagtttataaatgaaatgaataaactttactttctagctatcaaaaaacaacatagacaaaatcgaataagaatacatacaatttaatcaaaagagtgataacattgaatttttgttaccatagtggtaagtggtatgtaatgcactctagttggcgaggtcatcaatttgattgttttcatattagtaattctaatcgccttaaagttgaacactgccacacaaaaaaaaacgctttaaagttgaaaactttggtttttaacaggattgactcaaatgtagatgaaattttaaataattctattttataaaaatcaaaacaaaacttgtttatttctaagtatctgatcgtattttatctaaattcattttttcttcaaactctagttatcgaagagcataagagcattttttttttaactgagattttttaaaaataaaatttatttgaaaaaatattaaaattcactaaatatacagaagtagctgatgtagggaatctaggtgacatctcatcttaagcattttatccattttgggaactgttaaaaaagttatgcttttaccctttttagtaatttccactacacctctgacatgatgtgcaaacctttttttgtttgggggtggggtggggggttcagatttgcaaagatataaacatataagcatgggttattaactcaaaaaaaaaaaagactcaaacatttaactcaaatgattcaaaaaaaaaaactaaatattttcgaaagggtaaaagccttttgataaaacaggactatgcataaatgttttatacaataacatattatttataattcgagttttttttattgtgggtatcttaactagctaattccactaaaaccataatataaaaataatattatttctattttatattagttgtcggttaaaattttttcataaatattaagaaaatattcaatatttttttacctctaattaatgtattgttttatttaatatcatcaattaataaacttaaaaatagagataaatttgaaaattttgtcaagtattaatatttggttggaccggccctgggtaagactcttaatttggaattttaagctaacaaatattaatattttaatataattcaattatctatttaaattaaatatgtaaacaaaaactataatcattcaaggttggcattatcatgagtgtgtctaataaagaattcatgggttctcaaaaataagaactttaagaacctctctcaccttctatctccaacattttaatattttatcattattttagagaaactattttgattagatatttcattagagatgctctaaaaactcatgaaaggaaaagattttatttttatttttgattggctgatgaatttatttttattttcttagcagaggaaaagattttatatgtttatgatttgcaaatctatatattatgtgtcatgcatgtttaaaatttcatgacatggcgatgacacatgacagtttcgagaatgctgacgacattcatatggagaggattaaccaattttcatatatattagataaagatccgtgttatgctgcagagtattttgatgaaattgtgtttgagtttctaataatcaaagtactaatcttatttagtgtaaagtcataatctataacttattcttcttttaaaagaaacaagaggattagtttttttcttgtagagttgatacgaagttgttttgagtggcatttttcgttaatacttatgttggagactatgaattgttatgaaattttaccattgtctttttttatataattatattttaaccattagtcatattaattagttaaaacgttaacttatttatttatgtatgatttattttttaattattaaaaatatgaccaataaattgaaatttcttctctctagcgagataaaacattacgtagcgatgtttcaaactaaatttggcttcattacatcttacaattccgacatttttatgtcttctagttgaacgaaaatattgatgtgtcaggtttgagagacatgggttttagtttaattgtattgatgattttcaaataaatattaatttaagggaaaattggaaaaaaagatatctacaaaaaaatttgataactgaaatctattaaaagtatttgttattttattgctaagatactcagagtatcttaaccaatggagatgtccttagtgttttaattacaatttacataatatgatatatactaattaccccaaataatcttgtatatatcactcgtccgacaaacacattgctgagacaggtttttatgtcattaaccaaacattattcaactggttgagtcggttaataaaactcaaggtgcagttggtttataaaactcaagtttacgatcctacttaataatgttattttggtaaattatgttgtcattataaaatctagttatgtcgtttaacaagaaaaagtattatttatgtcgtttctaacttttcatttacaattttgtttctttacgtttttctttgccattgatttgatcatgttggcttttatcttcttttggaaaagcaaaggaaagttaaagtcatataaagcttttatttctttcaagtaaaattatagctagtcggccaatctgattttcttcgaaagttaatgggcttattaatatgtgcagcactaaatgatagcacaatttgcatataaaatacatatgccttatgagataaacgaagtggcactggcatgacttcggtcgtataccggattcaacaagacacttaaacatctcgacagtgatcgttcggagactatcatgtccattttatcaaattgacttgtaaaaataagagcaaatgcattttgtgatataaataatcaaatcaatattttataactcttttcatacactatatcttttttttttttcaaaaataaaaatagtacatgtgttgtatttgaaaaagataatacatactttgtagatccattatattatgggaaaaaacctgaaaaaacctccatttatttttaatttgtccgtttaatacatgcgttatttaatttgtctgtttaatacttaagttaatttttatgtcctttaaaaactttcattttctaaaattttgacaaaatcagacgtctaaaataacgaccgttaacagtggtaacggaatcgctaaccacaattaaaatttaaccctataatgtttactatttatatacaattgattttctaattgttacgaatttattatcttagtctagtggttatgtgagtatttattattcgaatcaccccgagatcaaatctcatgtccaaccaattctttggatttttttccaggattttttttccctttgcttcttattctatgaaaacaaacgacgatagtactctatctttccagatgaatctccttccctatacaaaagcctcatgcctcctcgctctctcgcaattcacaaagtttccaaacatctaaagttttcaattttacaatattatcgctatcatctgcttgattctctgcaaaaagagaagactttaactgagaagaagaagaagtcgtctgatttattgaagaaactctgcgaaacaaactcagttctcatatcgtttaaggtaaataagcgcaacattcttttttcaatttgtgtgtttgtcgattgtatatgaaagatgctgagattagggtttgtttgtgtgtttttttcagggattttaaaaggctaatcgaagatgaatccagaaaagttcatacacaaaacaaacgagacaattgctacagctcatgagttagctgtgaatgcaggacatgctcaattcactcctttgcatttagctggtgctttaatctctgaccccaccggtatattccttcaagcaatctctagtgccgatagcgagaacgcaactcaatcgaaaacctaatctgatatgggccgccgtcaggtttaaaaaaaaaaaagaccaaaatattggaggggtgtggtgatcgaactcatgttcacgagaataataaaatctcacataaccaatggactaggataatatgttcgtaatgactagaaaaacaattgaatacaagtaaacaaatattatagggttaaattttaactgtggttagcgatttcgttaccactgttaacggccgttatcttggacgtctgattttgccaaaattttaaaaaatgaaagtttttaaaggacataaaattaacttaagtattaaacagacaaattaaataacgcagatattaaacggacaaattgaaaataaatggaggttttttcgggtttttttccatcttcttattatataaagtacagttttgaaagttactaactcgcgagatcatgacacatgacaattttatcaatcttagatgttgacacgtgtcaaacaaaatatataaaaaaaaactgtatggaaatataagaaaactatatgtattttattaaagttaaaaatagaaattgaagacaaaaaaaggccaaatgtaagttaccaattcttaagaaaaatggaaaaaaatactactttaatttctccttaaaagataattatggaaatttattagaaaaaaactaaataagataattatacaaaaattatatgtatattattagataaaaatagaaattagaaaagctgtcctactatataattctaattaaatttaccaactattaaaaaaaaggaaaatttacaattatttatcaattatagaagaaaaatgattatatacataattctacaaatcaaaaagaatgtttaggattatatacataattctaaacaaaaaatatgtaaacatccatctctatataaacaaagagataatctcttattttttcacaaaaaacccctcaaaatcactgtttttgcctcaatgttttgttttttgttttttcttggtaagtcaaactttaaactttttttctgggtggttgactataatacatgtacatttatcatatttattttctaggtttaccctgttcttatgctattagagtattattatatcatgcttgcattagaaaatattattcttcgttgctatttaaattttcttggtacgtaaaaactttcttctgggttaattagttaatatttacttatacgttgactataatatgtatagaactgttatatttattttctaagttgacactgttcttacgctattagaatattatatagaccttaccttagaaacaattattaagcgttattgtttacatttacttatcttcaattcttaaaaaaaaaatcagaatagctatcatcaaagataacataaagacacaagttcaagaaagtgggaaccaagaaaaaaataaaaaaatgaactcataaaaataaaattgctcctacttgatgaaaaggtaaattttaatactttaatcctaaatattcttcaatttattaatctttttttaaaacagaaaaatacaattcaaggttctatccatcattatcttattgaaaagtttggagctcaattatgtgaaggaaaccttattgaaatttgcaacttccatgtgcaatatgttgaaataagaattacaagatctccgatcataaatctcagatgatactaacagaaaaaatcacgatccatccataaaattatagtataaataggcgggccttatgtggatcaccacataaactaatttcttcataaatactcacaattgactcaaaataattatgaaaatatcatttaaacaatgtcatttaataaaataacatgtcatactaaaaaatataggagtaacatgtgattgttatgcaggtgacgatatatagtgactgttcatggttacaaaagtggtgatagaaaaaattagtataagggaaatataccttattatataattagtatgatatattttagtttctcaaagttagtaattaatattatcatgaatatttatcaatcaaagattttaccatatgtcatgatttaaagggatttagtcaacgttgatcaatcatctctatatttttaacgtgcctaatttaaaaccattttgaaatcattcgctaactttatgatgaataattttaattttagtttttcatataagtatatcaaaagttattgctatttgatatacttttcattcaaataatttgagcaattgctatatgatatatttttcattcaaatcattttttattcaataattttagtggtaaaggaaacaatacaatattaaaaaaaaaattacttttaaaagataatttatacttacaacattgttaattattatattttattaaatttgattttagtgataaaaaaataaacccgtccatcagacgggtccttatctagttatattatatatgatcgtttttttttcttctaactaaacattaattagaaaaacaaagtttgaccagtatagtgcaattagaagggtatgtgtctattaaaaaaatgttatttggcagtagctttaaataatagaatataattctaactaaagtatattgtcatttatatagttaatttatagttactttatcaaaattaattgtaactggttcttatatctatagtgtcttcactaacaaagtttgaaatccaacattatatgattgaagttctaaatatcatgttattcaaattttatagattttcgaaaataatatatcctaaaagatttggatgagtatggggattatatcctttgtcttgttaactagtcaaatcaattaattttaattaaatacgtatatactaaatcatatattcaaaaacatcggagctagatcaggttacaccagactcgatctcgactctagaacttatttcatatgtaaactatacccatgaaaagattttaacattttaccggcatattaacattttttcatttgtcaaaaacagagctcgtaaaatttaagagaaataagttaatacttttatatgttcttaaatcttacgttatttacgcattttagtctctttctcttatgattataacccagtttttcatttgtacaaacataaaccaataataatgttcattacagtttttggatcaaagttgacactccctgcaatttaaattagtatctagagtaccatccaaaattagtgtatccatcagcccaagcctagcccaacatttcgggccgtttagtctgattaagatgcgagccttatctcttgaaagggagcaatgaagcgacattatatgtttccgaaatattcatcaataaaaaattgttgtaaagaaagaagaagaaagattcatcaatctaaactgtcattttgtgttaatattatataatgcatgttccttctcgtaacacttttttttttctttccaaaatttagaatttgcgtgattgcattgctgcaagctggctgtaatatctcttttaggtaaaagttaaactgttggaattgatcactactaaatcaaaccttttctgctatattattttgtgaatttacttctaacttcttcgtagatctatttaaaatactaatgacaataaattcaaaataaaataaaataaaataaatactaatgacaatgcaattggtggatataagaagctattggaatctgagtatgtgtgcatcaacttatcttactaatggcaaatgactcatagagcgaagccgatgacaagacttaattagatagatataatattgaagttaatgttagcctattaggtaatgatttctattatttcttaacaaaagtaaatcaaattgtaattctaagaacattagagatgagatcgaatcgaatagacaattaattgtctaataggtaatgctatttttcagctattaaaacatatataaaagagctgatcaatttaaaacatattttttagctattaaaacacataacaaattttatttttcaatttaaattaccaaaacagttggtaaattttagcgttatgtgtgttacatctccaactacttttatttccaattaaaccaatccaactggttacaaacatacagtgagctatagttggcaatacagaagaacataagtcttataatatagagctgatcaatgacagtactatcacgattatgatagcaaatatctagctacctctataaatatgatatatatatatatcaaacgggcaaattagtatccttatgatttgctattgtatggtcttcgttatccttattctgagaaaactgggaactgttcaaagtcttcgaaacagactgatctgtctcattcttccttccccaaagaaaaacgtagaggccagttatagtcactactgatccaagtatgctgcatttttaaaataaacgtatcagtgcatgcatgcttgtatcgaccttagtttgttatatactatatagagttgatttgagaatgaaacctgccaaggtataaaggagagtgtaagatgaggaaatcgaataacgtagcggcgacgaggctgacggggctgaatgttgagacgaaaactgctcctgtcatttttatggaccatgacgttaccactgtcgacatcgcttgtcccactattccctgttttttattttcatcaatttaatcaaacctttttataaataagcatataaactgttggaaaaaagagattattgataaacctaatttcttaattagaaaaagagattattacagaattttacaaatatgatgatatgattggttttgaagacaagaagtcaagaatcaacgaaaccactaaaaagtgagatttataaaaaagcagagattataaattacgaggaacttttataaaaaggtgacaatagataagatgacatttagatatcaaagaaaataaaacttctaactctttctttgaacaaaataacttaacattttatcaatttctacaagcttaccctataatttttatcatattcttcttagtgcgcattttatgagtatatatatatatatatatagccaaaagaagatggaaaaaacttacagcgtaaagggtgaccaaaatgacgaatttatcttcaatgatccaatctttgacgtctctacttttataaagactcaaaatagcacattgaaatgatgcgaagactgacatgagacaagtgcttgagtatttatttccaggatacttaaagcttaatttcccttgaaacaacatccatagagacaacaacactgtcccaatgactaaataaagacagcctagaagccatttctttgtttggtcgtgaccattgttattgttgttgttgtgacgagcttgtggatgagaatgagggtttgataactctgggcctttgtaaaatgtcaacaacattgctcccattatgcaaattagggttcccattactttgagcacgcctgctttgctctttaggttttgcgcattctctatcctgcaaaagtatttataaaaaaaacgagaaaattttgatgtatatatatatgttactaattaaattagttgcattaccggaaaataagggctaacgcaaaggtgatagcaggtaacatgctaactagagccatcgaaacagttgctgacgtgtacgaaagcccaagtaaaaagaaaaattgcatcaaacttgccctgcgtgatttaaaaaaaaaactaacataaaaaacgaaacaaagtaaagcttgtgattaataggagataacgtgacagtttctcctttcttaaaagtaaataaaatcatttagaagaaaaaggcgaaattgcgtaatagagtatataacaggaacaagtgaaaaggacaaacccaagtaatccgctgatgaaatgttcgcacaaaagcatgaacgttagttgtggccttgttttcctataataaactcatttaaagagcaaacttcattacttagatatatataatgaaaacttatatacatacatacatgagagaatacaccaataatactacaactttataggtacgtagttgaaatttcgacgtctgaaaattgaatcatatatatatattccctataaaaatacgagaacataaccagagaacttcattaactagcaaaatgtatgtaaagatagtttcaaaatctgagttttgacgaataagaatcagaatgttcatacctctcccaaatataagaaaacggaaccaagattagagcagaaatagccattctataagcaccaaagatcatatggttaacaccaacatcaagtgctttcttaacgagagcgttcactgatcccattgcaacacttgatattaacattactatcactggtgcccattgttcttccttcatcatccctctctctctctctcgccctcctgaatatattattttattaattaagattttcttatagttttttcttttctgtaatgtcgaatgtttttctttgtgtttggcaaccacacgccttgccatctacttatatttataataaagtttgtaggtggttgccacataggatatctttcttttttttaacctaagtataatatcaacatatgtagtaaatttttatcactagtgttaaaattatgtcgaatatattttaatttactggtggtagatcattttcaaaggaatctttaaatccggatttaaatttagtagtttaaataagaaactaaaaaggtgagtaagttatactttccatcagaaaaaaaaagataaatttgaataaaagttggtttatcaaagtttttctgtatatatatatatatagatatagatatatatataaaataacattttaaagcgaaaattgaaccaaatgccattatgaaaaaaatgaaccttgtaaaaaagagaaacttatataaaaacttaatacaatatatagtgtctcttaattatttgtgaaactaaaccataatttcatatgccttaatttatgaaactaaaccataatttaacagacaaattctgttatatatcattataatatatatgtcccattcacgagttattttattacataagaatttactctctctttttttagaacaccaaataatttactctaaaatatgttaattttttttttttttgtaaaccatcttaaaataccatgttatatattgcttgtcaagcttcattttttctttgtttggtttaagtcgaacttttattttacatggaaagagatattaaaaatgtgatcaaaagatatctataaaggttgaaaattctactacgacaagtttatatttttttttctttttcatattcatatgttgttttaatgagttaattgataccgacgtgtctacaactagaccaaactatacaaaagttacacaaatataatacgtatgaatctgttggaaaaaaaagtataaatgatgaatgtccaatttatttgtcatgtattgacaaggacatgcatatatatacaacgcacaacaactcatacattgattttagcgaaacaaaaaagggcaaaaaataacaactctacaaagatctattagctaatatgctcgcgacgatattgaagttttacaagtgacattctactagatataagagacaaattttgtcctgaacaggatagtcaaattttagtttgcaacacgcaaacgtgaagatccaactaacctgttagaaaaagtgaaaaaaaaacggaactaggaatcgcaaaaatgctatattttaaattctgcgtctgttagaagttgtttgatatgcttaattactttttactctaaatcggtttcatttcttatgagaaaaaatatttctatgaacactacactaaaattaacaatacctgaatttggagaaatcggtgaaagtaaaaaatgctttcatacaccatatctagttttaaccctagtaattttcttagtagggttttgcccaaagatcaaagagaagtgtgtcattactgtgactaatacaaaatagtctaatgactcagtgaccaacaaaataaaagtaatactaaagaaaaacaaataatttaattagaagactagctagtggatcgttgacatggacgtatgtacgtagctcaagcacaatggctgcactatatctaaatcattacgaatctaaactgtcggccatgcctcggaatctaaagccggtcgtaatctataacccattacattaaaatctctgagataagcctaagtccaacgattcttaattgttttactgctatgggatttgagaagattggggcctggtaagggagatcaaagataccgcagccttctgggcagatcctaaaggtactactgtatttgttgaaagattaagaacatagaagaatcagaagcattgaagtagaagaatctcacgagaagaggaagaagcaaaaccaacgtggtattggtccagtagtaaatctttgagatagagctgatgggttcgacgcctgttggaagggattttttctctaaatgacatgaatttaacttcatgtagatctcatctctaaaaaatataggacattcgaacttgaactgtcagatattcaaaaaaaaaataataaaaaaaagaggaacaaacaaaattaacgacaaatggtgatgtcatgactttggtcctgtttgtttacatgtcgatagcgacataaatcagcgaccgtgaccaaaagttgttcgtttacttgtcgctagattcaagtgtatgtgatcacttttctgcaaatcaaggttaagcttttatgactaaatcacaccttcaagtgatgaaaatgcgaaggtatcgacttataccaaagaccatataagtttacatattaatgcgaaggtatcgacttataccaaagaccatataagtttacatattaacccaacaaataaagttgtgggccttgtccagcttttttgttcaataacatgtatacacggtgcaagtacaaaaattagaatgactagacgaataaacacattttcgcttaatccctaacacaaacatttccctaagtatcttgaattcaattttagttacttttcatgtagcttttctttgtggtatatgtatgtgattaatgctttcgagaataaaagaaaatatgaatacaaaacatttaacaaggtctgcaagggaaacttgttaaaaataaaggcaagaaacgttaatcaatcaagatcctgaatgcacagtcgtgataattggcatgctcacatcgttagttggtgatttgatgtgttcttcctaaaaaagttccttaagaatttcacttttaaaacagaattcagattttgcattctcgctacaaaatacttgtagactgagatacaatctgaattatcatataacatttgtttgctatcgtaacgttttttttttgtaaaagaatataataccagtaatcaactttttttggttctggttctatatgattggtcaataactgaaataattttaggatatcatagagttaacgagatcgattgaaaagaaagtaaatatttattgttatatctttgtatataaatttattgggttagtcaataacattgagagatactattatactactaaagtttcatccatttttataaaacaatagagctctcaaaatggacgggcggcccgtgggcgtgtttcatccattacaactgtagcttcagagtcttcattcagcataggaagtcgggttttaaacaagtatcggagttgtcttcttccttctacagttcaagctttgatatgtgcgaggaattggctatgcaactttgaagagattggtaagcttttgacttcttttcttttgtcatatttcaatcaatttgaatcttaatgcatattgagttcttcttttctgtagtacttaggtgataatattgagttccttaataaagacaaagatggcgagagagaagaagaagaagtttaaatttgcttttaatttgtttttggatttgatactttgttaaatacttgaattgtgtttaaatttgcttttggatttaatacttaaattatttaatactttgttgtttaaatttgcttttggatttgataatttggttgaaatatgaagcaaatactattgtgttaaaatttggttatgttatgctcattggacagcccagttggacatgagctttaatgagcatgaacgttaatggacatggaccttagtggacatagacactatttgtccaatatcgaaatggatattattggactgagctaatggacatggacatcccgctttgagtatcaagtaacaagaaaaaaatttgaatcaacaagaaaatataaaccatagaaaaagaatatgtttaaagaactcaggaaagaaaatgaagtttcatagaaaaagaactagtatcaaattccgatataaattataccatttgtctccagcttcctaagccggcaatgtacaaacccttccactttcgaatttgttcggttagaaatagatttatattccacaatttcttgcacctacgttgatgcctatatatatagacacacttaaatgtatgtggaatttgaaatatatattgatatagtaaaatgggatgtgtttgcagcaagcaattagaaggaagaaggcaagaagacatttcgcttcttgcttctcaaaccttttgtaagttacgtctacttcaatcatccaccacttcctcctcctatatattatattgcatggagaaagaatattattacacgagcttgtagatcagataacatctaaattgttttgggtttgcagttagcgaggctgaggttgaagttttgcatggattgttcatcaaactcacttcttgtcttagcaacgacaatcttttgaccaaagttagagtccaaactaatttttcttccacaatgtgaataatttttttttggtcaacaaaatgtgaataatataacatctaaattttatactagctagttatagaaaagttgtgcttttgtcatgtcaaatttggttggcttttccaggaaaaatttcaatttatcttgatcaagaataccaaaaagcgcagtctttctgcagaacgggtaattgaatttgttatattaagcgaaataaataaataaacttcgattgatgttgtttctctgaaatatgcagatttttggattattcgatatgagaaacgatggggctatagattttggagagtttgtacacacactcaacatttttcacccaaactcatcaccaagagataaggccatatgtatgcttcatcacttctaatgtgtttattcatttattccatgttattattattttctatatagctagagatcaatgttattaactataaccacaaatacatctgatcacttgtttaaaattaaacagttgcatttagattatacgatactcgtgagactggattcattgaaccggaggaggtacgtatgtaaactttgtctcaaaaaaaagaaaaagtcatgattaattatatttgacggttttcctcgacttggagaaatctataggtgaaagagatgataatagacgttctagaggaatcagaacttatgctatccgagagtatcattgattctatcgtgtctaaggtgtgtataacgcttaagtttatgagcttgatttaacattatagtgattttacttactatttttgtttacttatatttggcaaagacatttgaagaggccgattggaaaaaagatgggataatagatttggaagaatgggagaattttgttgccacctatcctttgacactaaagaacatgactatccctttcttgaagtaattcgtttgtttgtttttcctaaccattttcttaatattcgctgataaattgcatgttttagatacatctttcgttttacaaaaaaagtaatatatatacatctttcaaaaacagcttttatatatgtgtgtttatgcatatattactattatcttcttttattttatttttcttgttttataaatcgagataattattctaaaattaacttttattgtacagggacattccgaggattttcccaacctttctccggtaaaatcagatgaggtgtttgctagaggtttttgtttaaaaatatttttatccgaaaatcacataggtaatttgttataagaaatatagaaggttaattattatataaacatattaactatcgaaagaaatctttaatatttaacgaggatagaaagtaattgtttttaaccacaaagctaaagctgtgatatgaaaacttaaaagcaaagatcggttcgtgaagacaaaatggggttttggaaaaggaaaagaggaaaaagaaaaagaacaaacgtgtgaaaattcgagaaaaatggtaacacaaaaagaaattggacatgatataagttgccaaaaccaaagagaaaaaattgacatgatataccaatcaaatttttgaatcaggtcaactaatcaaattcacaacaatcatccacaatattatttagatttgacgctttcactgtttcacatgaaaattttacatttgacgcgatgacttgtggagtcacgatcattttagtcactcgttttaaacggatgcttcattcaaaaaatgtaacttatattcagaagactcctaacgtccgattcagatttacaaaaaaacaatatcattgaatcggaaaacagaaaagcatagtaatattctaagtatttaattataatcgtgaggaaatagttccgtaataatgggggaaaaatatatatatgataaaaccaaaatgagatttgcctgaagatgccatatgtctgatcaaacactctgagctgttgtgtcgatgaactcaccatatgccaagatacgctattagcgacaacacatttgtattgtcaaatgtcattaattaacatccacaggtccaacaacagagaaacaaaataattatcacaagtaaaatataaaattagtaatatacttgtacttataatttttggcttatgccttttaatttattttaacactagactcgacgaaactcatcactaacatgaccacaaaaaaaaaagattacaattctaaaacacaaagattaaaaaagaaaacataacgaagtaaaattaagactagacatcaactttacaagttgaaggagcgagaagaggaacttgtccgttagaagatggattaaatctcaaccacacatcacatctggcgtaaaatccataccgtccagtcttaatcgcaccagctttccaacgtagcctcccaaaaatcaccactctcatcaaaacgacgccgtaagcttcatcattttttaaaccattagctacttccggcgagactggtataccgttgcctcccatcaccggagctatcacaaccgtagatttatgtcctaaacgaagcggtggtagtggaagcggcggtgttatgatctgatctttgtacgttacgtacatagagagcttgtcgtagtgaatggagactctccggttagggtttcttgctaaaacgctgaactgaacggaggttgagattaacggcggcgctgtgaaattcaggtcgtagatggcggctccgacgacggtgagacgtggtttatgtggacggtagacgagccaaaggattaaggctatgatacctagtatgacaaggatggtgaagatcgcgccgcagattgcgcggcgagcatctccaccgcctcctccgccttctttagagtaagattctggcgttgaagaagcggagggagcgttcttgtgatctgctttggctgcgtgctctgcttttgcttctccttctcccatggctatactctacagatataagtgttaaagtgtgtatgtataggtatgtgtgtgtctatacgagaatcagagggttcggtgaagagtgaagactctaaagaaggaggaggagaagaaagaagataagtagatgcaaggttttgtctcttttctagttaataagagtaaacagtcttctagagtacagttttattaattgtttattaacttagaaagcttgtagttgtaattatgtgttaaagctaatctttttataaagtagccgtaaattactactgtttttacattgtgattttattttgttataatacttaatgtaataatataagatagagaagtactttcgaaagactccaaatctcggtgcaaccgttcacgtgacggatctgatgagtgatgaattttttaaaaatgaaaaatccaatgtaacgtgtatacatatggctatacataatcaaatactttgttgtcaatgattgacttatttggtgacaactatggtttcgtgcaacgtgataactatcactttttggccgtgttaatttttaaaaaaattagaatgaaatttatcaggttacggcctgtcaaagttagcaataacctaatatctgtttgcatgccagaatacggttatgtagaaagaaaattaaattatcatatttcacaattctttatcaactgtataaagcaattaataataaattaattagataccacatgtgtcatatttgttctaatgtttagaaaataaaagtacaagtcttttatgtccacatctccaacaatacttctgaccaaattccatatattattagtaagcttccaaaataaataataatcacatttaagaagaatctgttatttaatcacactaactgagataccgcaccaccgacactgtagtcaccgacaatgctgtggatgctacctgggcctcaattataagcccattataaaattgggcctacactaaaactattgtgtacagagagatatttgataatttgctgactgatacaagtctcacttccaacggccgatttattaaaaaaaaactccgacaaatgattcgccggccgatctacgacttcgccgccgtttttcgccacttaacttctccgttatcgacatcctcgcgttttctgttctattcttcatctgaacatgaagctcgaaaaccgattgtctcgaaccctaaatccccaatcgggtctccgactcgggttcaaaagctcatagcttcgcaatcggatcctctcctcgccaaggagattttcgattatgcttctcaacagcccaatttccgccattctcgatcttctcatctaatcctcattctcaaactcggccgtggtagatatttcaatcttatcgacgacgttctcgccaaacacagatcaagtggttatccattaaccggagaaattttcacttatctgatcaaagtctacgcagaagcaaagttaccggagaaagtcttaagtacgttttacaaaatgctggagttcaatttcacgccgcagccaaaacatctgaatcggattctagatgttctcgtaagccatagaggttatctccagaaagcttttgagcttttcaagagttcacggcttcatggagtaatgcctaacacgagaagttacaatttattgatgcaagctttttgtttgaatgatgatttgagtattgcataccaactgtttggtaaaatgcttgagagagatgttgtccctgatgtggattcttataagattctgatacaagggttttgtaggaaaggtcaagtgaatggtgctatggaattacttgatgatatgttgaataaaggattcgtgcctgataggttaagttacacgacattgttgaacagtttgtgtaggaagacacagcttagagaggcttataagcttctatgtaggatgaagttaaaaggttgtaatcctgatcttgttcattacaacacgatgattctcgggttttgtagagaagatcgtgcgatggatgctaggaaagttcttgatgatatgttgtctaacggttgctcgcctaattcggtctcgtataggactttgattggaggattgtgtgatcaaggaatgtttgatgaagggaagaagtatctagaagagatgatatccaaagggttttctcctcatttctcggtttcaaattgtttggtaaaagggttttgtagcttcgggaaagtcgaagaagcttgtgatgttgtagaggttgtgatgaagaacggagaaacattgcattcagacacttgggagatggtaattccattaatctgtaatgaagatgagtcggagaagatcaaactgtttcttgaagatgctgtaaaggaagaaataaccggtgataccagaatcgttgatgtcggtatcggtttaggatcttacctttctagtaagctacagatgaaacgtaaaaatgctagagagaggaggagacatttataggttcctcctgatcctgaaaagctgtagaaagaagaaggaaaccttgagtttgtttactgagaaagtggtgggccttatttgggctttattattagtttaagcccatttggcttcaaaattagattctgatcaattagaagcgagagtggcaacgaatcagatctgaatttgccgattactcagaaaataaaaaaatgccggagattgaacaagacgatgcagcggcggagacggtggattcctccaccgttaaattcggtacaccggaagcactggagtatgtacggtcgctcacggacgttggcgcaatgacacgtcttcttcacgaatgtatcgcttaccagcgaagcttagactcagatctcgacacgcttctatcgcagcggacggagcttgatcggaatctcgttcagcttcagagatcggcggagattctcgatatcgtgaaagcagatgcagatcacatgctcggaaatgttcgatcgacttgtgatctcgcggatcaagtcagtggcaaggtacgagagctcgatcttgctcaatctcgtgttaatgttactctctcccgcattgacgcgattgttgagcgagggaattgcatcgaaggcgtgaagactgctttggaatccgaggattacgaatctgctgcgaaatttgtacagagatttctccagattgatttgcagtacaaggattctggttccgatcagagcgaacagcttcacgcgtcgaaggagcagcttgaaggtattgcgaagaagaagctcttggcagcaatagaccagagagatcatcctacaattttgagattcgtgagactgtattccccactgggaatggagacagaaggtctacagctttacgttggttacttgaaaaaggtcattgcgttgagaggaaggatggaatatgaaaatgttgttgagctcatggagcaaggactcggacaggttaatttcgttgggtgcttaaccaatttgtttaaggatattgtcatggctattgaagaaaacgatgagatcttgaggggtctttgtggagaagatggtgttgcgtatgcgatttgtgaattgcaagaggaatgtgatttaagaggttcgttgatcttgaagaagtacatggactttagaaagttagctatattggcgtctgatattaacaattctcccaatctgaatattcttcccggtggtgcgtctgaaggaccagacccgagagaagttgagctgtatgtggaagagatactgtcactgatgcagttgggtgaggactataccgagttcatggtgtcaaaaatcaagtctttgacgtcggtagatcctgaattgttgccaacggctacaaaggcatttagaaataagagttttagcaaagcgattcaggatgtgacgagatattatgttatactagaagggttctttatggttgagaatgtgaggaaagctattaggatcgatgagcatgtacctgacagccttaccacttcaatggtggacgatgtgttctacgtgttgcagagttgtctgaggagagcgatttcaacttcaaacataagttctgtgattgctgtgttgagctatgctggtagcttgttgggcaatgattaccatgaagctctacaacagaagattagagagcctaaccttggtgctaggttgttcttgggtggtataggtgtggaaaacaccggaactgagattgcaactgctttgaacaatatggacgtgagctgcgagtacattctcaaactaaaacatgaaatcgaggagcaatgtactgaggttagttctcatacttctgatacttcgtgatttacttatctaggatacttaaggaacaacaatctgggatctattagactagaattctcttgcttactcttgcctgactctatatggatatatctcttcacttactctgtgttaaggtgttaacttagatagcgattttagaacagctgtattgtttgctagagctaatgcaggctctgttcgtctcataaaatccatttaaattggcatttgagcaggggcaccaattctgtgaatggtcgttttgcactcttgaattttagacaatcggtctcactttctttatctcgtgtcctaatcacaggtatttcctgcaccagcagatcgagagaggataaaatcatgtctatccgagctaggcgagttaagcagcacgttcaagcagttactcaactcaggcatggaacagctagtagcaaccgtaacaccaagaatccgtccggttctagacaccgtggctaccataagctacgagttaacagaaaccgagtacgcagagaatgaggtgaacgacccttgggtccaaagacttctccactcagtcgaaacaaatgccgcgtggctccaaccactaatgacatccaacaactacgactcgtttctgcatctcataattgatttcatagttaagagactcgaagtcataatgatgcagaaacggtttagccagcttggtgggcttcagcttgatcgagacacaagggctttggttagccatttctcgggtatgactcaaagaacagtgagagataagtttgctcggttaacgcagatggcgacgatactgaacttggaaaaggtctcagagattttggacttttggggagaaaactcaggacccatgacttggagactcacaccagctgaggttagacgggttttgggtctccgggtcgagttcaaacccgaatcaattgctgctctcaagttgtgatgttacttcttttcttt

SEQ ID NO: 509 - DNA, 72872 bp, Arabidopsis thaliana
aagcttccactccagcgttccatctcagaacattaggcaccaagttaccttcccttatgtgcttcatcaacttctctttccaatcccacctaccttgtttatgaaatccgatcaagagtgaactaattgtgaccaaatccacagagaaacctctagtctccatctcctctaccaattttactgctccttctagcttcccttccctgcaaagctgcaacccaacaatgctaaacgtaatggcatcgacaaactgacccttcttcttcaagtcacagaacagagtaaacccagcctcagctcttccgttcctaaataacccgtcaattagaatgttgtatgtccagcaggaagctctaactccttcttgaaccatcttctcaaacaactgacaagcctcagtgacttttcttgccttgagtgtcccatctaaaagacaattatacacaatagtatcagggacaaacccgttatactgcatctcaccataaatcctcattgcatcatccatccggtaagatttacaacatccttgaatcagtatacgatatgtcgaattatcaggctcatggccagacaccttcagctcatcccatacaatcaaagcatctttagcttttccaaataaacacaacacatgaatcaggctgttatatgtgcatatatcaggaccaaaagaagacccatagaccgaacttcgctccttcatctccttgaacaaactcaatgcagcatccaagtctccccaacaaccaaatccatgaatacaaatgttataactccatgtatcaaacttgaatcttttcattccctttaacttttcaaatacccttttgaactccgacctcatatctgctctccttagaccaaccaagagctcattaacagcaacagttccaggaagataacttacaataataactctaccagtatcatcatcactatggttatcagaagcttctaaaagcttaaataatatagacagagcaagacgcaattcgtgtttcttcaccagagcaataagaacagaatcatatacactaggatttaagcaatctcctaattcctccatgtaatccaaaactcctaacgctgattcgaacttacccgaacggattagagaatctagaagtatcttcgccatcgtctggtccaagttaactccatcttccttcattgaaccaagcaaatcgggaacttctccgagaagccctgtccgacaaacagtgcgaaatatctgagagtaagctgtcgctgaatgtttgtatccaggacgaagagaataacaccatcggaagaaatctagcttcttcgatggatctatggagtttctacgaaggatctggagaaccacaggttccgaaatcggtatcgaattcgcgtcgaggcttcgtgtaccggactgagacaaggtcttggacaaagacgcgacgagaaggacattgcagagctgtggaaacggtgaattcttcgccggtgatagaccggaaattgcagctgatacggcgcttcctcttccatggcgcatcgcatagtgaccactgagaaacgaaattgatagctaacatacacggcgtcgtttaatatcgttataatgaaacgccatagtataatgtttcttcaaggcccagaattaagcccgttaatagactgatacggcgacggtttaacgaatattataaagatagataggcctatgcttaaagatgggcccaagcataggcccatttgtataggtttttcaattttgagtcgataaaccctaagttagtctccgtcgtcttcattctcagctttgccgttttcatcgattaaagagagagaggcttcgttcgccgtccgtcgtaaaaatggggttcaagaggaagaaagatgatggtgatggtgaggaaatggaatctgatgttcgtggaaagtctactttcagtgggggtgagaagaggaatgtgatacttccttcgatgattaagaacaaagataagagatcaaaagtgtatgcgaagcagaagcatgagaagaaattggagaagcagaagaagattagagctcgtgatgctgctgagaaacgagctttagagcttggagaagaggtaacgatctggagaagcttttttagggattttttaaaggtgtttatgaatttgagatattaagtttggtgtgtgttattcgtttgtagcctccacaaaagatgattccgaagacgattgagaatacaagagaatctgatgaaactgtttgcagacctgacgatgaagaagtatgtttagatttaaagtttgattcatctcaatttttgaattcaattcattgtcgtgttgctaatttagtgtaattgagtttgtagttgtttgcggatattgatgctgatgagtttaatccagttctgagacgtgagattgcacctaaggtcttgctcacaacatgtcgtttcaattccactgtaagtcttttttttttggtaccattgtttcataagagattctacagatttgtttgtggttttctgattcaagtaatgttgttggattgcagagaggacctgctttaatatctgagttgctttcggtgataccaaactctcattatcaaaagagaggaacctatgatttgaagaaggtgttgttataagtttcatagcttccttgtttctctataaagttagtctttttgcaactatataaccttgttagatatggttctgcagattgtagaatacgcaacgaagaaagattttacatctcttattgttgttcatacaaatcgtagagaacctggttagttttcactgagtttcaagttttgtgctctctactgtatatgctttgtttcaagcttttgctatttcatatgtagatgcgcttcttatcatcggtttgccaaatggtcctactgctcatttcaaattgtcaaatcttgttctaaggaaggatattaaggtatgtaagctaaccattactcttctctacatcgagtgtagattagtgatcactgaattggatgttaaatgtaactgcagaatcacggaaatcctacaagccatcaaccagaactggttttgaataactttacaacgcgtttagggaatcgtgttgggaggtatagttttcatagtgttgttgacttggttttatggtctctttgaatttcttgctgatgttagatttttccttttttcagattttttcaatcactcttccctccggatcctaatttccgtggtaggagagttgtaacattccacaaccagcgtgactttatatttttcagacatcaccggtacataacttcaccttttcttcttcgagttgcttttgctccattctccaataaaactttttattgaacaaatttcaacactatccagttacatatttgagacaaaggaaagcaagagtgataaaggaaaagaagagacaataaaacctcgtcttcaggtcagttttgaccatgttgaatcaaaaagtaatcaacattatcaatgtttgtatcattaaactttggatttttaggaatgcggtcctcgattcacgcttaagctagttactctacagcatggaacttttgacaccaaaggtggagaatttgaatgggttcataaggtaaaatcaccagaaatggacacgagcagcttcattgctgttctttagagtttttgatgatttttaattttattttctgatgtgttttttttttgtatttcattacagcctgaaatggacacgagcaggagaaggttcttcttataaattctgctgtcttccgagtttcaccaagttttgtgtttattttgcattttcgaattttccctacctccgtccaaaattgtatgtctttaaaacttctcatttcttttttcaatatagccatgagccatcgaaacaatcgtaagagtacttgtttcaacaatataggccctcgttttttactaagctatatatagttggttaaacttatgattgtttggtttggtatatatcgacatcgagcatttgaatctacagcagtaatattggattttgtttagtagttaagtggacctttatgttgcataattaatagttttacgatcatcagttcatcaccataataataggattagatttgaggatgtgaatggttacggtggttgagacggataaatccgtttgcgaattagaccgtttttgatttaccatttataaattagagtatgtaagattatagattaagaaaaataaaagaaaatcgtcgcggatcaattatagaccgtttttaccgccgtaagcattcaaatcctgaacatctctaatgataatgtaataggattgacaaaaacaaatctaaaaattaattacgattatttaggtgtagtatagaacgtaattacgtatatgtatgttactatgttgtcaattatgtcggctataatattccagaaagatccttcggaaaggaaaaaaaaaaactgaaacttcggttcgaagttcaaacaatttttcttactgccacgtgttacttcatacacaattaaaatatttttttgtccctctcatttgtcaacgtttaggggaaaaacattaatatacttttactgcattccgccacaaatatctttctttctttttttatggttcttcttcaccccaactgtattagtactgttcgtctttcagaaaaaacaataatagatagaggaaaaaagaaagaaacagagaagtgagaaaaagcccttaaaactcaaacactaaaaaattttcagtgtcgattcaaaaagttttgttatttgatctgtttctgtgtaaaaaaaatggtgaaagatctggttgggtatagattttatccaacgggagaggaattgataaaccattatctaaagaacaaaattttgggtaagacttggctcgtcgacgaagccattagcgagatcaacatctgtagttacgacccaatttacttgccttgtaagtttcctcacttcaaaatcatcatcgttgtctcatcatcggtcatttctaattctggatttgtttggttgttgtagctttatcgaagataaaatcggatgatcctgtgtggtacttcttctgtccaaaggagtatacttctgcgaagaagaaggtaacgaagaggactacaagttcagggtattggaaagctactggtgttgataggaaaatcaaagataagagaggtaatcgcggcgagattgggataaagaagacgcttgtgtattatgaaggtagagttcctaaaggtgtttggactccttgggttatgcatgagtatcacatcacttgtttgcctcaagatcaggtataataaactcagagtttcttgaatttgagcttctgtgttagtttgacttagcgttatgtttctgttagttgatcttcttgaattggatttgggtttgattcatctgtccctgtgttggttgctatctttatcccaatttgaggttaaagtcatgttcttgtaagaatagatttgggtttgacttatcttttccctatgatgcttagtacatcaagtttaggttctgtgtatcagagtttgaagtgttatatatagaagttgtggcctagaaggctagtgtatttgcttccctgtgttgaatatattactgtaatctcccctgtgttggttgctatcattagtacgttctgtgttgtcacagagttttaagcgctatgtatagaagttgtaacctagtgttcttacttctgccaaagcttgtgattgtttgagttatgtgtgtttgattttttgttttgttggcaaagaacttatgtgtgtgtgtacttttggaatttgttcagaggaactatgttatctgccaagtgatgtataagggtgaagatggagacgtcccatctggtggtaacaactcgagtgagccgagtcaatctttggtctctgattcgaatactgtcagagctacgagtcccacagcgcttgaggtgactccagtttctttatttgataatctcatgtacttgattcgtttactcaaaactctcttttacattttcagtttgagaagccaggtcaagaaaatttctttggtatgtctgtggatgatttggggactccaaagaatgaacaagaagatttctctttgtgggatgtactggatccagacatgttattcagtgacaataacaatcctactgtgcatccacaagctcctcacttaaccccgaatgatgatgagtttctcggtggattgaggcatgttaaccgagagcaggttgaatatttgtttgccaatgaagatttcatatccagaccaaccttatctatgaccgagaaccgcaacgatcacaggccaaagaaggctttgtcagggattattgttgattatagcagtgatagtaatagtgatgctgaatcgatatctgcaacggtaaagcaaatcacccgttttctttatcgttacttctgtgctgtaatctccattctcacattttgattatattatgtcagagttaccaaggaacatcaagtccaggtgatgatagtgttggtagttcgaatagacaatttctccagactggtggagatgagattctatcgtcttgcaatgatctacaaacctatggagaaccttccatcagtagtagcacccggcaatctcaactcacacgaagcatcatacgaccaaaacaagaggttttgcgttgctcttatgttgattctatatgatttcaacatatgttggatatataaagataatgattatgtaactttccttcacaggtgaaacaagatacatcaagagcggttgatagtgatacatccatagacaaggagtcatctatggtgaagacagagaagaagagctggtttattacagaggaagcaatggagagaaaccgcaacaatccacggtatatctatctcatgagaatgatcataggcttcattctcttgctggctctcattagcaacatcatatcggtgttacaaaacttgaacccggcgatgaagtttgatcgcgagagatagacaaaagctagcagattgatcaaagcactcgtttttactttgcttttatttatttctattttcttccgaaattttgatgtatatatgtgtgtgtatgtatgaccaagaggtatgtcttgtacctaaagttaaataaaatttagggtttgaaaattttataacatttagagcgggtccatagttcagtgccgtggtggagcattagactgctgataaagaaaacattcgacagagaccagtgaatggtttgaaaggtttctcaaagatttggtttgttgataattaagagaatgattacataccggacaagggactggtctaatgtgattgatacttcgatgatcaatcaatcaaatattacttcgatgatcaatcaatcaatcaatcatattacttacaactatgtaatatgattctatgaacctttttcttgttttttgtaaactttaatcccttatcttgcaagccaaatccatagacatatattttacaaaattagtagtagtactatattgaagtagagaaagtaataacgccatgtcgtcgtcgtcgatggtggcggctataatttccgaaagatccttcgactcaaaatacacaaaaaaaacaaggaaaagagaaaggttcatactttcgttcgaagctccgacaatgaaccgtcaataatttgccacgtcttcattctcattcacaataaaaataaattttgttcctctcatttgtcaaccttttttgtttttgtttaaagaatttgtcaacctattggaaaacattttgcattcaattaaaatcttatcgctaacagttttttgttttttgtttttttttcaactatcttatttattaacagtagtaaatttgttataaaatacataatattacatttcttccaatacataattgatatctaaatatccgatcgttgtaaatttggagtttcattcatcttaaaatgtgtgaaaaattacggctgatgtgtgacaaacacaaaagataaaaagttactaaacacaatttttttacaaaattaaattgaaacgaaaaaaaaaaatttaacaaaaaactaaaaagaaaaaacattttagaaatagacacaagtcatcaacacggtttcggcgcgagtagacttcacggcttttgttctttacttactgagaaattactaaaatttggtttttttttttttttcaaatagaaaaaaactataaataccatcactcgctatctcttcaccaatcacttcctacttgtatttgaaaaagaaagaaaaacagagagagagagggagaagccaaaaaaaaaaacagagaagcagaaaaaaataaattccttcacccaaaccctagaattttttttagaaagttttgttttttcgatctgtttctgtgtgaaaagatgatgaaaggtctgattgggtatagatttagtccgacgggagaggaagtgatcaaccattacctaaagaacaaacttctgggtaagtattggctcgttgatgaagctattagcgagatcaacatcttgagtcacaaacccagcaaggatttgcctagtaagtttattatgaatgatcttgatctgtctctctttgtatcatcatcgatcatttctaaatttgggttctttctgttgttgttgttgttgttgctgctgcagagttagctaggatccaatcggaagatcttgaatggtatttcttctctccgattgagtacacgaacccgaataagatgaaaatgaagaggacgacaggttctgggttttggaaacctactggtgttgatcgggaaattagggataaaagaggaaatggtgttgtgatagggattaagaagacgcttgtgtaccatgaaggtaagagtcctcatggagttagaactccttgggttatgcacgagtatcacatcacttgcttgcctcatcataaggtataacaaatccttcagagctcttttggttctgtatcttccatttgaattctgctcatttttgtcttcttcttgatttggggatttttgagctctgtggttgtgtaaagattctaactttgagtgtttttgcttctaccaaagcttgtgattgagttgtttgattgatgtgtgttctgtttttgttgtttggctggcaaagaacttgtgtgtgtgaaacctttggaatttgtttagtatacatctagtttgatttgaggttctgtgttattgttgtttaaagagtctcaagagtgtttttgcttctaccaaagcttgtgattgatgtgtgtaccttttggaatttgttcagaggaaatatgttgtctgccaagtaaagtataagggtgaagctgcagaaatttcatatgagccaagtccctctttggtatccgattcgcataccgtcatagcgattaccggagaaccggaacctgaggtgagtccagtttctgagatgtttcattatgattcattactatcaacctgtgtctttacttgttgttgtctctttttacagcttcaggttgagcagccaggtaaagaaaatctcttgggtatgtctgtagatgatttgatagaaccaatgaaccaacaagaggagccacaaggtcctcacttagctccgaatgatgatgagtttatacgtggattgaggcatgttgatcgagggacggttgaatatttgtttgccaatgaagaaaacatggatggtttgtctatgaatgacttgagaatcccaatgatcgtccaacaagaggatctctctgagtgggagggatttaacgcagacacctttttcagcgacaacaacaataactataaccttaacgtgcatcatcaactaacgccttacggcgatggctatttgaatgcattttcgggttataacgaagggaatcctcccgatcacgaattagtgatgcaagagaaccgcaacgatcacatgccaaggaaacctgtgacagggaccattgattatagcagcgatagtggcagtgatgctggatccatatctacaacggtaaagcacatctctcattttctttatcattacttccctggagtatattctgtattctcagctttccattctaacctgacagagttaccaaggaacatcaagtccaaatattagtgttggtagttcaagtagacacttgtcaagttgctcaagcacagactcttgcaaagatctacaaacttgtacagatccttcaataatcagtagagagatccgggaattaacacaagaggtcttgagttgctcttatgttgattttgttgctatttgtttgtatcttgtaatctaaaacatatgttggactttaaagatgatgattatgtgattttccttttcaggtgaaacaagaaatcccaagagctgttgatgcacccatgaacaatgagtcatctttggtgaaaacagagaagaaaggcttgtttattgtagaggacgcaatggagagaaaccgcaagaaaccacgatttatctatctcatgaagatgatcataggcaacatcatatcggttttactacccgtcaaaagattgatcccggtgaagaagttatgatcgcgagagaggcaaagcagatcgatcaaagcactagtttgatataggaaaaggaggactaagaagagtatacacatggacggtgatgattaaaaaaatgaatcaacggctgagatgaagctatcagagattgttgggttttaaaggaagctgaagatcagaattgaattttatcgtgaaaattgtgaaagtttgttatcttcttctccattctctgtttctatgagaattctctatggattctcatggttatttcctcattgtagcttgagctgtttcttcttctatgctctagcaatttgagaagtgaatccgtgttttatgaacattgattcaatctatcattcgatttgtgtttcatagagaatgataagctctggaacttatctaagatgaaaagaacagaaagaaatggagggagagaagtattgcatctttaaggtggagaagaacatagataagagagaaatttagattagatattgttgttgatcgttttcgataaccattacagagacgaagaagagtttaagtagaagacaataagaggaaattgggcttaacactaagcctaatcaaagccccactaaggcccactcatcttcagttttggtttctatcaatactcccctcgtgaagagccagcttgtcctcaaggtggaagaaagtggaactccgaagcattggtaatgactttatacgatccatcacccgctctcaatgatgttggatgtgtgtccggttcaaccgttcgattgcgaagatctgggcctagctcaatgaagccaatgaagttctcggttgaatcgaaatctgaatgtaaaccatcaagagttgccaaaccccacttatatctaattgcatcacattgtgttttgtactgaagctctggactgaaacctttggacgataacctgaaagcatgtttcaaaaaacaaaagtaaccatatgttctttaatggtgaagagacgtgacttcccttgccacccctgttatcttgtcctttacacttctagtgcataaccacaacttgcttccaaactcacaattccatttcccttggtcttcaagaacagtagtattcttaagtaagttcaggctctctataagcatcagtttcatcccaaaagatccatttaccatcatatctttgaatccctgctgcctaatatagctattatgattctcacaaaggagaaattcaagctcaatcctccatatcttccaacaaaccaccaagcagtataattgtaacaccccactcccacatagttgggccaatttgttttgacattatgatatagctcataaatggcccaatctctttttgatgacaaacaacaagggttttgtaagtgtcatatatattggggtatttaagtcctaaactaagtcagccaccatcatcattgttgagacgtgagttcgtgagcctttgttatcgttgtcgtaatctccgcattatcaacgtcgagagaacctattgatgttccacctctttgttcatgtcttcttccaacatcaatgtgttttgtttctctataaccaaactgccatgatctggaaagaaaagaaaggagaagaataaaaattgagaagatcgtgaaagagaaaaagagaaggaagcggagatgaaggcggaaacatgacggaggataaatcatcaccaccacgaaggagaaacagtgggaaagtgattcatgttcttaacactaatcagaagtattaagtgaagaagaccgaaccagattgaagcttggcgaagcaaagaaagaagaagaagagaaaagagggaggaagaacagtttcaagatggggttttgtaaggatcgttccagtggcatcagagagactcaagtaaggtgtaaggtgtctttggaaagataacgatatcaagaatccatagccgctgacagaattggaatcgagtatatattcaagaagttatgcacgtttctttcatgacaagtaactgcaaagtctgtcaaatgcaggaacccctaaatgacagttcgagatggtttgttgatgacaacgtttggagcttttaatgaagtccgatcatgctgtaaatttgtggagttattcatgatacttctatctacatattcaacggtgagatcacgtttctaacggttagttcctgaattttgagtatgtttccaagacagttttatttgaagtaaatagtgatgaatttgtgttgttggttgggaaacgagttcgattagagctgaagttttgcaggagatttcatgactcatggattcagttcttagtcgagggagaaccaagttaaagcttatgagcatgtagttgtggtaaaggttgagaaaggagaagtgaatcttcatcttcaattaggctaaggtgagggtggtatttgcgaaacatggtatcattttcttttgttatgcttcttgacgcatgatatgtaggcttagatctgattgtataggattagattacatgatgatatgactttatggttgttgagtatgatgtttgataatgtgatgttatgtatgatattataagtatatgtatgttaaatatgattatgagtgtatgtatgatgaatgtatgactggggagaatcgagctatgggccgtggtttccctagtgatgtggacaatgatggatcgacgggttaacagctggtcaagaatggctgacgagcccggaatgagagtgtctgagccacgagggccagcctccactcatgaggttctagtcgtcacgatgatgactggacctaacgatacgatatatatgtttatatttatatatataagatgattgttatgaatgtattattagaagttaaagcatgttaggttgattgattgtgtttaagtttatatgttgtgatgatggttgtatagctttagaaagtgtttttatgtttctgtgggtagagttgattctcctcacttagtattctttactcacttcttctttttctattttttcctcaggttaataaacgtgaggagttatgtgcaatattttattcatgtgtaaagtttaaagaaaacgttttggcaatattagatgaataatatgccgtcttgtcctataaggcagggcgggtgttacaataataatctcatgagaatgatcataggcttcattctcttgctggctctcattagcaacatcatatcggtgttacaaaacttgaacccggcgatgaagtttgatcgcgagagatagacaaagctagcagattgatcaaagcactcgtttttactttgcttttatttatttctattttcttccgaaattttgatgtatatatgtgtgtgtatgtaagaccaagaggtatgtcttgtacctaaagttaaaataaaatttagggtttgaaaaatttataacatctagagcgggtccatagctcagtgccgtggtggagcattagacggctgataaagaaaacattcgacagagaccagtgaatggttagaaaaggtttctcaaagatttggtttatgataataaagagaatgattacataccggacaagggactggtctaatgtgtttgatacttcgatgatctatcaatcaaaatctttgcaacatttaagaacggctccatagctcagtgccgtggtggagcattagactgctgataaagaaaacattcactaaacattattagacagagaccatatgattggtctaatgtgtttgatactttgatgatcaatcaatcaaaatctttgcaactagtatattagtacattcccatatgtttggcttttcaactcaaaagtgttttgtttttataaaaaagtttattcagaattacttacaactatataatatatcattatatgaacctttttcttgttttttgtaaacttttatcccttatcttgcaagccaaatccatagacatatattttacaaaattagtagtactatattgaagtagagaaagtaataacgccatgtcgtcgtcgtcgatggtggcggctataaatttccgaaagagctgcatgctttcgttcgaagctccgacaatgaaccgtcaataacttgccacgtcttcattctcattcacaataatttttatatttttctaacaagttagagtggtgatgttacgtctagtgcagaaagtataatctgtttcctgtcgtcgtcctaatgttgacaggaagccacaacttgagtaagaattttcccaataacttttatgaacttgccacctatccaattaggaacaaaaagagatcgaagaagttatgtaattattactttcttatactaattaattaaccttttgattattggataagtattacttacaagtgttaaacacgtgtcctgcacgggtactgactgtgatatcaaaattggagtcagaaaagttgtgcataccaaaaatgattatagtaaaaaagttgatggttttgagagtgcatacaaaagctggatgagacaaaaaaaaaaaaaaaaaaaactaagaaagaatgggagatttaatgaactccatcaaatgctatatatgtcacaacacatttcaagaaccttttatcagtgcaaaaattatataatatatgttgttttcatgaactgctttgttttgtgcttctcttttttactgtatttccaattatatattcttcaaactctcttccttctaaattcaccaaagcatagcatatctgatgagaataaatcaaaatcatataattagtatagttaaggacaatgcaccacacacatgaagattcaaagaaagtgtgagacttctaaactctcttttgctattgattttgcatgtcaaaacttcaacattctttctttttctttttacttcaccgttctcttttttgtttttacttcaccattctcttcttcgtatgtcttcttcagttttactgttatttataaatgcatcagtcgtctagggtaaaagttgagtcagtttcagaatatctcgaaaagcaaatacaaaatcttaaatttcttaaacaaattagattatacgatcaatcacaatgaataatataaatgtttaagggaagattaagaattcaaaatgtaacaatatagttacgatagaatgttgtaaaagattgtaaatctcttggtttaggcaattttttttatcaaccacacattaattaaaaagtaactccatgactggttaccgaattaggaggaatagtgtctacaaagataacttcagaaaataaaattgtaaatgagggagctaagcagtccgctctaacattacatgagcgggagataagagaaagcgagaaaaaggggaaagagccgcataacactctaagatcgtctagcagattggtgaaagcgggtcattcttcagttaactgtcccatggagactagctctgaacaatcattttctaacgccttttgcaccaaacaatatcatttgatcattttcttgaaaacaccaccatcctaaacccatatttggatccaaagatttccatgagccatcaaactgacatcttacagattgagttgggctgtccaaagaacccgtaatagtggtagagtcgattggttccaattgagcttcttcccacattaatttttcactcatagcgtgatttaatatatccgcagattcagattgtattcctttgaaaacttttttattcatatctttccatatgaaccacaaaatccaagcgtaacaataagttttctctcccccaactggagggagtggtaacctctaataaagataatctagatttgaaagttctgaatttagaggaaaactatctgataccattggtattttggataattcgcaaattttccgagagtgagagcattcaaatagaacattatttattgtttcatctgccatctcacacattttacaagttatatcacactgtatcccacgatgtgataattttgaagtaactgctaagaaacccgaagcaatttgccataagaagtgttttatttttggaggagttttgacctttcaagcttgtgcttttagtatgttacaatttgggcctcaaccagttgtattcgtcatctttcgagcaagccaatagcctgatttaaccgtatatctctctgattttgtgtgatgccatatcaacctatctgacttataagattgactgataaaaagacctctgataattggaatatccgctggatctataaatttttctagaaggaatgtgccactctttcgtgaccggaataattaaatggttaaccatcatattatgatggagacctcttccatttgtggggcatggtttgatatcaggagtccaaggacccgccaaaccgataaactaaattccgaacctatggaccatcttgttcctatttcaaccaattttttagtcaaaaaatactcctccatctaaatgatggagagtttattttttttgtttgtagcgggtgaatatttttgaaatatctaccttttagcacccgagctactaaagaatttagatattggtttagacaattttaaaattttgaatatgtagagaatattgaactaaaatattgagtattaaacgttttcactttggaatatgattgattataatcgttctgtagtcttaaatttgtttctgtaattggatgttttcgatatggaagtgaataaatctcggtgaataaatgcagaattcttctagatgggcgggagataaaaatgtgttgcttgacttggattacatagaatatttcaagcgagaaaatcttagcagtttaattaaatgaaaagaggactgacagaaattgaggttatgattgaatatttcagaaaatattatagtaagatattatgttgagatattctcatatattacgagttcaatatgatagataataagggaaagaattaatgacaactactgaatgctaataaccgaataaatcatgtacgaaccgaaacaaattagtagtcggttctatttagaataggttttattttctgtataatccgtgaaaccgaaactgaattaatcgatcggctcaaagtcgtatgctagttaggttctttgtttaggccgatggtaaccaaaaacacataccaacacatgccgacaaagacaaaatatatctagcctaatgacactgaattcaaacctcaaggtgccatgaataattaaagtgctaaaccatgagagagagtcttgttacaagttacaagtgggagccatgggaccgaggttcttatgtgggggacctacaagccgggcccagcttgatgtccggaggaggagccgaggaagtggtgtgactcttctctagttctctttgtgtaaatggtccctttctaaggccacgtgtccccgagccaaaggaaagcaccttctctccgtgtcttattcgtctacgtcgtattcgtatagatgtttttaataacctaacgtcgtcgaatcatattatataactaagttatttttgttatattcactaccaattaatgtccacttcaacgttatatcaaccgtttttgtttcgtttggggaaattaaacagcagttaaataaaagaacgttgatatatgaatacttaaatagtttggaacaataatacaccactcgttaccaaaaagaaaaaaaaaatacacaattctcaagtattgtgttcgtttatacagaaatcaacatcaatacattgacatcatattcttaaaaaagggtaatacgtacgaaaaaatagccaaaaaagaatgtcatgatgtgtgtgtttgataatgtgatgagagataaaaacatataatatatataggtttggaatgattaggtcaatatttttggtgagcaagcaaaattaaatcgcgatcttaactaaaatggaataaaatatacataattagaatattttagttatatgttgtaaatgcgatttgtaataataattaaaagtttctataaaatttgatatatgaatattttgtagtgtagagcaattagttatgttgagatattttagaaagattattccgagaatattggcaaagatttgtgaaacaatttgatgtggtaagattatgatattgtgagacactaatattccttaaaatcaagtatatacttattttacataaatagaaatttagatatggttagttgatataaaatcaaattattgatattctcatatatttcgaaatgaatgtatattatcgataataaaggaaagttttaatggcaattgtttagcgttaaatcgatttgtaaatatgcaatttttggatttactaatcaaaccggatttattgttgtaattgataacagaaggataaattttggtaagatttcattagcatttaaaactataatgatttttgaatcaagtaaattatagatacggttcgttagaattgtgtatcgaattttactaattaggaattaatcattaatgaatttcgtcgagttttaagggagtaattatgcaatatttttaagtagtacttaataatatctatttttaagcaagaaattaatgcaatatctaaattgttgatcaaaaatttgttcattgttttaatgaaaatattttgtctgattgaatttgtaaggactaactatataaataggaaattgataaatgatttttcaacccaaaatccttactaaaaacgtgtatatagatataaaccttgttcttgtttttgtaaattttcatagaaaattacataaacagaaatttcactttaaaaagcttaatactaatagaaacatattatagaaaatagataacattagtagtagtactttttttttttttttttttttttttaaaacggccttttattagttatagaacccacaaaattgggctgggctttggtttacaaagaaaaccagagacaaaggaaaaacgaaaaaatctgtcgggaccggaaaagaggatcttgccctagtgacaccgtgacgcagagaaaccgaccattagcaccgacggatgcgagaaccacagctttgcagcagatcgaagtatctagtaaacagagaggaagcatccgacttccgctactattccttttcccgcgaccaaccgtttccaccacaaatctctcggcatggtcaaccctccgacatcacggcacgccgttgttagctcccgtacctagcaagccgacaatcaaacataacccctctttcccaatccaacgaatctccgatttaccgaacaaaaaaccttcaaccggccaagaggaagcaagtcacggtggtgtttgaggcccaaggctcaagcgaaacacccaaacacactgaatccgcgacagccaacaaatctaggaagatccaccgttaacctccatggcgaattggcactacccaccttctctcgatcgacttccgccgtagttgcagaggccgacacgacggctgagccacgagaagaaatcgctacaccaaccggcgtccacaaccgaagggaatcgtagcaactctctacttccaacacatcggatccacaactacatcgaaggagagaaaaaccacaccactgccaacggagaaggcatcttgttcacccctgaaatttcaaagcaaagccaaagagatgaagatcaaaggcaccgagaaaagcagatctagatctaaaaatttgttacagtgaggagagagaagagaggtttttttgggaacgattgtccttcctcttcctagtttcttttgggttttatggaagagagaaaaatggaaatgtgatgaaagacttcagtagtagtactatattgcagtagagagagtaagatcagcatcctcattatacatattttatgagttaaaattttaaactaattaaaaaaaagaaagtaattaatggaagtgtattcatttacatctaattctaaacagagagtgtctttaaatttaaggtttagggatgccggatgtggatgcgctaataacgcgaggttgtcctccatcgtcgctgcaataaatttccgaaagatcaaaaataggaataaagctgcatggaaagagctgtatgcttacgttcgaagctccgagaatgaagctaaaatatatgatgaaaatgtgtatgatatatagttaacctcaactaaccctccagatgtgccactggcttacctgatcaaaacaaaatatatggacaaagtgaataaaggaattgtaaggaaaaagtaaaaactcttatagaaattctaagcaaattaacaaatacgatctagaaaataatttcctaaaatgctggaaattacataggtaatcaccttaaatttagaagttgaagtatcccagaagcctctattggtccaattactatttatattgtttggtctagtgagtagttacgttcaacaatctcaaatctgcaagtccttattctcctataaaaaaaatcacaaatatgtgcgtcagtgcgtgagtccattgaatatacttaggatttctatttttccctaaaaaggtatgaaaaggaaatgaaactaacataaaccacaaatgaacaaacgaaattgacctgattaagaagacccaagcaagagatgaaattgagagtgatgagtcatattacttaggagaggcttgattttcaaccagggccggcccgtgtatgagtcatggctaaacaatattaaattaattttaattactagggagactttaatagggagacttttatagaaacattaactctttccaaatcattacattagttgcagattccattttaattactagggagtactttacaagagattttttggtcatataatatttgaggctgactttggaggctttacaagagacttttatagaaacattaactctttccaaatcattacattatttgtttaattactaaacgtaaacgtccaaaaaaatatttgaggctgactttggagagaaagagagtaaatgcattttgctgatccatgttgatttcttacgcacactaaaaaataattataaggagagagagagagagagagagagagagaaagagagagagagagagagagagagagagagagagagagagagagagagagagagagagagagagaattgttttcgacaattactacaaataccaccgtcaaaatgtgagaaattactacaaattggttttactgaaaaaaaaattaccgtcaatcattttctataaataccaccgtcgctcgctatctctttcatcaatcacttcctacttgtatttgaaaaagaaagaaaaacacagagagagagaagccgaaaaaacttcactcaaaccctaatcccgggaacccgggaattttgatcattttgtttcttttcgatctgtttctattttaaaaagatgatgaaagatccgactgggtatagatttagtccgacgggagaggaagtgataaaccattacctaaagaacaaaattctgggtaagacttggctcgttgatgaagccattagcgagatcaacatcttgaatcacaaacccagcaaggatttgcctagtaatctctctctctctctctgtgactctttctctctcgctgtctcgatctatgtgtgtctctctctctttctctctctcattctctctctcactctctttctcaccctctttttttttttttttgataaatatgtgaattttcattaaatgaaaaggcttgtagaagctacaagagtcttaatacaaacgattgttccttgccaaaaaaagtaaaaacaagggagaatcgaaaacatttaatatgagtaggctattgtgctgaatttctcaccctttttctcactttctttctcactctctttctctctctctgtatcatcatcaatcatttctaaatttgggttcttttttgctgttgttgttgttgttgttgttgcagagttagctaggatccaatcggaagatcttgagtggtactttttctctccgattgagtacacgaacccgaataagatgaaaatgaagaggacgacaggttctgggttttggaaacctagtggtgttgatcggaaaattagggataaaagaggaaatggtgttgtgatagggattaagaagacgcttgtgtaccatgaaggtaagagtcctcatggagttagaactccttgggttatgcacgagtatcacatcacttgcttgcctcatcataaggtataacaaatccttctgagctcttttggttctgtatgttccatttgaatcctgctaattttagtcttcttcttgttgatttcttggttctgtagggatttttgaggcctgtggttgtgtaaagattccaacattgttgttagagtgtttttgcttttaccaaagtttcttattgagttctttgattgatgtatcagtagcggatttaggaattaaatttatctgggcaataatattaaatacgaaatgatccaaattttattaacaaaatgaaccttgttaaagcatttgattagttttttaaagtcaacgaaagtgatttaatgttattttttgatgaaatatgggatttttaagaaagaaaacaaaaataaattgagtttttctaatgtattttgggattatgtggactttaaattatagtattatacaacaaaaaagcgtataagaagaaaacaaagtaattgagggcaatacaaacccaatatataactgcccctcacgtgtacggaacacgtacgtacgccatttccaactccatgttctctcttttgttttataaagaaaaaataggaaaatgaggagaaagggaaagattttaataaacgtttctcacacatgtcctaatataattagtttacctaaaatatttattaataaaatatgaatatatttatatgagaaagtgaaatcgagacgcgttggtgatgctcgcacgagtgcatatttatgattttatgaatatttaatattgtgttgtttatatgtttatgattttacgttttctgtatttcttgactttaaagccaatcattaactcaaatggaatccaggttaatatttcttcttaaatttcgtgcattttgtgtttgtatttactcatgttcttgctttttctttccactacataatcttcattgattcttctcttctagtttttgaccaacttcctttttaatcaaattatgtcaaatttatttttgtttatactttatacatttttaaaatttgaaaaattcatttttttaattatattcttaccattcactgaataattcatatttgtttgatttataccctaacaatttatgcagttgcttagaattcgtttttattttttataaaaaaaaattaaacactaaaagatattttttaataatatatttctaataaaataattttaaatataaacttttatttcgcctatgttcttaaaaaccattggcacggctctggactcatgtgtgtgtgaaacctttggaatttgtttagtaaacatctagtttaatttgaggttctgtgttattgttgttgtttaaagagtctcaatatgttgtcaagagtgtttttgcttctaccaaagcttgtgattgatgtgtgcaccttttggaatttgttcagaggaaatatgttgtctgccaagtaaagtataagggtgaagctgcagaaatttcatatgagccaagtccctctttggtatccgattcgcataccgtcatagcgattaacggagaaccggaacctgaggtgagtccagtttctgagatgtttcattatgattcattactatcaacctgtgtctttacttgttgttgtctctttttacagcttcaggttgagcagccaggtaaagaaaatctcttgggtatgtctgtagatgatttgatagaaccaatgaaccaacaagaggagccacaaggtcctcacttagctccgaatgatgatgagtttatacgtggattgagacatgttgatcgagagccggttgaatatttgtttgccaatgaagaaaacatggatggtttgtctattatgaatgacttgacaatcccaatgatcgcccaacaagaggatctcattctctctgagtgggagggatttatcgcagccacctttttcagcgacaacaacaataacaataaccttaacgtgcatcaactaacgtctttcttaccgggatgattatcagaatgcattttgggttacaacggataaaatttttgggttataacacttgtttccttgggatatggggaaaaaaaatatacaaaacaaaagagggattgatgattccaaaatttcgttattgatttgttgatgtcaccaccactacaaaagatgacatgaacaaatgatgcagcgcatcttcaagacaatcgtgcctccggtattcttcaagttcgaagagattgttcatttgggtttagttttatgtgggctttaagtgattgtattagtttgtttcttcttatggctagggttttcattatctttctcttatttaaaaagatgtaatctattatcgtaattagttttgattctcgaataaaatagttttaagagagctttgtgtaaagcctagagaggagaactctcaactctaagagcttgtgttcaagccctgcaaggaggacttgcaaaacctcgtcgatatcgctaccgatctcgactttatccctattgtttcttcgtcaagtttcgacgttctaagcaagatccgttcgtgaatccaagttttgttagagatcttgtgttcttatccgttatttagtttccgctctctatcaacaaatcgatatagaatatagttcggatgaagatgttttctaaagcatgtgattgtgctttgttttcaaaaagaaaagaaaaaaaagaagaagaagaagatacgtgtgtgttatgtggtgaggaagatgaccaattcgccatgatagtacgtgattcttctcatcatcggtcttcatcttcaatacgagcaagatgagaccacagaaaataattactaaaagtgacgagtccaacggatacgatgctgatccaaggatgactaacttattatgactactacacaagttttttcatgaataggaagtttgaaagacgatcaaaacttgtgatttgaaaaagataaagatacataactacgaaaatgtatttttcatgtggttcttcgttaactacgaatatgatgactccacaaccgggtacaaatgtagaattgaaccctacgatcggatataaatatcaatgaccaaacgactcgatttgtagccgatttgatcctatgaccgggtataaatgtcgatgacccgattgctgggtataaagccgtattttaaaggcatgtccaatctcatacgtgttaccatgtatgagcttgccggaggatagatatagagaactggagatcgacggtaagatgaaaatatcaacaaatgataagaatatattattctagaagatggatgttaatattaaaagtttaggaaatttaacattatctctaaatatattatttatatttggttttatctaagtttaggaaacttggatctctttcatcttgttatataaagtacggtttcaaaagttagtaactcacgagattatgacacgtgacagttttatcaattttagattttgacacgtgtcaaataaaatatttattcatgaaaaaacattatgtggaaattaatttctcattaaaaaaataaacattttatggaaatttattgaaaaaaataaataagatataaatatacaaaaacaatatgcatcttatatagtgaaaataaaaattagaaaaacaatcactaattctaattcaaattaccaaatattaaaaaagggaaattttacatcaattatagaagaaaggaaaaatgattactttgtccttaaaagttaaatatttcatggaaatttgttttaaaaaactaaataagataattatacaaaaattatatgtatcttataaagagagagtcagaggctgagaatttctgtgtattaagaaatagttcgcgagcgtacatatatagctaactctaaacaagaatctgaaatctaggtacaatctaactagttacaacaatctttgcctttgttacggagttgatcgcaaccttcgaatatttgcagtatctgtggaatatgctgaatttgagtaaaccaacttgaaccaaacttcataaccgagactaaccaactctcaatatcttattagataaaaatagaaattagaaaagctaacactaattctaattcatcttaccaaatattaaaaagagagaaatattacaattaattatcaattataaaaaagaagtatatacattattctacccacacaaaaaaggtaaacatccacctctatataacaaataaataatctcttattgtatcatgcatgcattagaaatattattctttgttacgttggctagaatacgtattatactatgcttacgtttgaaaagttattcatgattattgtttacatttactaattatactgtgcttacgtttgaaaaaattattcttggttgttgtttgtatttacttacgcttcgaattttttaaaacaaaattcagaatagctatcatcatgaatagttcaaaaaaccaacaaagattatataataatagatcaactcaataaaaaaacgatgctatcgtcgaacggtggtacgtctaacaaaaaagtgggaaggaagaaattcaaaaaagagttgattcattaccatttatcctgaaaagcccaagtgaatgtgctcatgagaataaatttcctcctacttgatgaaaagataatttttaagattttaatcctaaatattctcttatttacttttatttttatttttttaaacggacaatataattcaagggtctcgatctccatcattctcttaatgaaaagtttggagctcaaatatgtgaaggacgctttatctaaatttgcaactttaatatgtataattgcaataagaactacaagatctccgatcataaattttagatgatactaacagaaagaacaacaatcaaaatgatcgatcaacaattttgtaaaatatccctcgaaaattttcaattttgaaacgacgaaaattttgcaaaattgaaagatatgacacaacaggtatacggtacatattctgaatttttaattttagtaaatatatatttatagtattttaaagagttatattatattcactcatttagttatacatatgttttcaaatataatagatatttttatagtaaaattatgaatgtcaatctctcatcattatatctattattgctttgctatacagatgtaattggttatatatataaaaaatagataaatcgaactttcctacacataatagatccatcctccttgaccaaaaaaaacagaaaaagaccatcctaaaaagagttatcctaactttattattagaaaggtacgtaatttttcccgaactctttctctctttactttaataatctctttagtttaataataagaaactaagacttttgattatataataagatgtacgtttgtttagcctaataatcattcttttaattatatatatatatatagtagaatagaaatttaagccaccacatgggcaaaacaagcagaataattggaagaaaaataccatggatgggaagcaacgataacattgttcttatcatgacaagtgttcttatcaaaatatatcaaggtacaatttgtttgtcagcatctgttggaaccaaattctatttgagccttgacttcgatcatgttacgtccttttgaaaaagatattttatgaatatttttttaattttatctaaatagttaaaaaaaaattaatgaaaaagttagggtaagccatgactagggtctaaggatattaaaatggatcaaatatatatgaattcaaatattaaatgtatttaatatttgatgatttattttcaaattaatttatttattatttacttaatttaaaattagcatttactataatttataacgttttgatctgttttcatttgacatttgtaattggctttttgtaatgtggctttcattacgaaagcggctttctcgatcgttgaccgttgactgattgagaggattaaaaaaacaacgaccaattggtagaatccacgcgctcgtgaggctgataaaataatgatcatatcataataattaataaatcatcatcatcagtatcatgatgaacatcattatcatatcatgccttattgttatcatcatatctctgcttcttcgcttggggtcctacgtatctcaaaaacaatgcagctttaatattatatcattaaagcgaagtaatgtttttttttgtcggcttaatattagtactcttaaagcatgatattgatttgtatataaaaccatataatagtactttgagaactgctacattcagttaatgatatttgggagtttattgcatctgacatccttgaggtaatagaacttcatgcaaataattattttccaacttatgaattttagtattaaatctatataatgttaaaatatttctaatatattttcacatttttaaattgtaggaaaagacttttgtgtgtaaaacaactattactgataatgtgtcacgtaatggttggaattatatatcattttcaacttgctcaacaaaattaagaaatacaggaccatctctcaaatgccaaaaatgtggtaaatcatcaaaatctgtaggagttctaaagtactattggttatcttttaatatatactgcctaaatatagtaagtattattaagtttaaaccattatattttgttcaatttcaaaattgaagtaattgtagatgatggagatgattctgccactttggttatatttgatcaagatggctcacaatcattggaacaactgctgaagatataagatataagtattatataattttatgtacatattatttaggtggacataaattccaatgaacaattaaatgaatgttgatcaaaataaatttgggggaagaaggcattcccaaaagttacattcaattataggagagatttatttgttcgagataaaagttaaagaaaaggattttcaaggatcttatcaaagtttcgtgctatgcttaggtcgtcccattgtactattttaacataacacatgaattttagatgtctttctatgtttaaccattttaggatgtcaagatgtgcaataagagtagtgaaggcaaacacggagaaaacgaagatcatgacgaaccacttactagtctaaagaaaaaaaacaaagattgaagtctaaactgaaacttttattatgatatgaagtttatgaaacaaaagaaaaagtttatgaaacaattttaggtttttaattttccttttaccacttaatagtctaaagaaaaaagcaaggattgaagtctggactgaaattattattatgatatgaagtttatgaaacaattttagtttttttcttttttagttttctttttgttcttcccttttcctagattttgtttcttcactattctaagtttcagatgattttttatgaatagttttcttaaaattaaaaaaaacactaaattaatgtcttctaaaataaggcacatatatatatatatatatatatatatatatatattacgagattggtcgataaatattttaattatgttatattttacgttctctttaaactattatcaacgtatttttaaccaatcaaaaaattagtcacctaccatatacaatagttttcttttacccgtactacgtacgggttgacattctagtattatcataacaattgtttttgtgaattatcatttaactcataccacatatttcaactctgttacactaatgttgtatcaggttcatgtgccgtaatttaatgacccactaagccagtgatagatacaacttttaattaattttctgagaaaactaccatttttatatgtgagaaagcgtaagaaattaaaacataagccaggaagagaagtatcaaaacttggaaatggaaaaacagtggcgttaaaacggtaatcagatcagagtagaaacaagattggagaagtcagggtcttctggttcgatgaccttgatgctcctaaagccaagggtgagagtagtcgttgggttatgcacgagtataagatcacttccttgcctcatcttaatctggtactggtactttcattcttttcttacataagtttatccgatagagttatggtctagttacaagggcccatccggcgtacaaagaattataccttaatggggtcatattttattaaatatataataatattatttgttaaactaaaataaaatttaaagtaattttatgaattaaattttataaatagagaaagagaagaagaaaaaattatacctaagtaaagaagaaaagttgaaaacctatataaaatatgatcaaaagttaaatagtatgtattataacaagaaaagattagtcaaaaaaattgattagggggtgcaaatgaaaaatatgaactaggaacatagggtcatattacatatttaagccaaataattcaaatttctaactaaataagcttgaattataaaagttatggggtcctttgaccaccttgccctccatttagctccgcccccgcccatccttgtgtctttccgaaacgtaggttatgaggagaggaacccatgaacacttatataccaacattctcttctctatcttaacgatatgcgatacctatcattatttcttgttcattatgagatttttcggtgttagatgcaaaacagttatagaaaaatattgacttttgatagagaatttgtaaaagaccgtctattgatagagaatttgttattggcaacagagctagtgaaagattaccacaaggagtcaatctcaagtcgatatgctataaaaattgatatttctaaagctttcgactcggttcaatggtcttttctcagaaacgtccttttggctatggatatcccgtctgagtttgttcactggattatgttgtgtgttaccacagcgtctttctctgttcaagtaaatggtgagctagcagggtattttcaaagtaaatgtggattaagacagggttgttctttatcgccatatctctttgttataagcatggacgttcttgctaagatgctggacaaagctgcgggagctaagaaatacggctatcatccgagatgtaaggatatgggattaactcatcttagcttcgcggatgatctcatgatcttctccgatggtaagatgcggtccattgatggtattgtggaaatttttgaaaattttgctaaaaaatcaggtctaaagataagatggaaaaatctacggtttatttagcgggtgtgccaagttcattgtctcaggagataaaggacagataccattttgatgttggtcatctaccagtcagatacctaggtctaccattggttaccaaaagacttacatcaacggattacaggtcattactagaacaaataaagaagaaaattggatcctggaccgctcgctacctctcttatgctggtcgtttgagcttaataacttcagtattgtggagtacctgcaacttctggctctctgctttccgtcttcctcgaggttgtatcaaagagattgagaaactatgttctgcatttttatggtcaggtcctgatttgaatccgcataaagctaagctcagttgggttgatgtctgtaaaccgaagcaggaaggaggacttggtcttcggcccttgaaagaaataaatgatgtctgctgcctaaaactaatctggagacttgtgtctcatgcaaactctctatgggttcaatggatagaaaaatatctactcaaagctgataccttctggtccgttaaagccacaactaataggggctcttggatgtggtcaaagcttattaaatacagagatgtcgcaaaggagttttgtaaagtggaagtgagaaacggacaccgcacctctttctggtatgagaaggcaatcaacagtggctgaggcttggactggacgagcgagaagacgacacagattggagagccttaatcggatcgaagaagctctattgtttcagagacagaaccgttgggatgttgaggacagagtgttgtggaaaagatcaactgatcactatagagccaatttctgcacaaaagatatatggaagcagcttcgttcagggtcgagcaaggtttcttggtacaaaggaatatggtttacccattcaaatcctaaatactcgttctgtacatggctagaggttcacggcaagctcaccacgggagatcgcatgcttctttggaacaggggaatgcagacatcttgtgttctgtgtgacagcaatgtcactgaaacaagagatcacttatttttctcttgcagatttgcagcagaaatatggagaaatctcgcaaaaaacatctacaaatctcgcttcttcacaaattggtcgtctttattggttgcaatctcaggacaatggcaaaacaatattgagagctttgtagcccgttacctcctccaaacagcggttcacaccatttggggtgagaggaatgggcgaagacatggggagtctcctaactcgggtactcatctgattcaacggatcgataaacatgtaaggaatagaatctcagtcatcaacgcacgtggagactgccggtatgacaaggccttccaatattggtttcaatctagaatgggaactaactagcaaatagataaaaactctttttaaactctttcgacaaaagtcgcactcgatgtacaaacgctatttttcttttgagtttaatttaacattacattcaaaaaactattgttcaggattcctatgttctctacaagatagttgataagcgtagtaagaaggcagacattacaaatggtaatactaataactcaagtgatccaagtcaatctttggtctctgattccaatactatcaaagtgactagcataccaaccgaggtgagtccaaatttctgaaatgtttcagtactcattagtatcgagcggtttctttactttgcttctttacatttgcaggttgagcagctaggtcaagaaaacatgtatggggatcgaaatatgtcttttagcgaatacacaacaacaacaacaaccctaatgtgcagctacaaactctttacgtagggacagctcaacatttgctttccgatcaagaaatgcaagagaagtacaggtcgtcacacgattctgtcagagctattaacacagctcctggggtgtgtctagtttctgacatgtttcattaatctcaagtacatgattctttttactcacactcacttttgcattttcaggttgagcagccaggtaaagaaagtgtatatgggttgactacgaatgatttgagtgttccaataaacgaacaagacgatctcttaccccggaatgtgatttgatcctaacactttgctcagcgactacaacgatgatgatttctggagtggattgccagattttaacggaggggattttgaagatgtgttttctgatcaagaattcataatgcttgaaccgcaatgattacaagccaaagaaatctttgtcagggatcattgttaattatagcagtgatagtgagatagcgatgctaaatcaatatgtgcaatggtaaagcacatcactcattttctttgtcagtactttccatggagtattaacctgtattctcaggtttttcattctaatatgacagagttacaaaggaacatcaagtccaggtgataatgttggtagttcaaatagaaagacccgggaatctcaactcgcacggtgctgcaccataccaccaaagcaagaggtcttgagctgctcctaagttgattttgtgggggcttgtatcttataatctcaaacatattttggattataaagataatgaatgaatgtagtttccttttcaggttaaacaaggaatggtgatcaaaacagagaagaagggcttgtttattattacaaagggagtaatggagagaaaacgcaagaatccaccgtatatatatcattaacatgatcataggcttcatcatcttgctcgctttcattaacaacatcatatcagtttagctaaatagcatcaattcttaactaagcattctctctgatcctaaaatttttatgaatatgtaatttatgtgtgtgtgtgttgtgtatgaactagagatgaaactaaactgttctcaacctttatatatagcttacagatttggttataggactttactgtgtctgttctcttcaaattgggaatataagttgcttgtggcttgttatctcattttcactgcaaaagagctgctgaatcacccaaaagtagttggatttttaaaaagtgtctcatctcctacatttatctttaagaacatattagacaaacaaaaatctaaagatcataaaaacatattaaaatatcacaagttcatgtattggtggtactctgtagatacattacagatcctaagacattggcccacctatttagatatatactagtaatttgtgtgtttccacatcgttaggaacttctcccgatccaggtgggccaccacactgcctgaaccgagtttggaacgccttccgactaatgccagagtcaggccgccaatcatttttgtgtgttttgtgtagcgatatgtttagtcatttttgttttgcttcgcttcgtcttatgtggatgttccacggcaatactcatttttgtgtgtttgtatagcaatttgtctttggcggttaagttagcgttagtcgacttttatgtatttcacctagcgatcgtttagtctttcacgattaagttggcgtttaattttgtgttccatgtgtagatattgttagtcatttttgtgtgtttacgttcttcgttgcactctaccactcctctctctctctctacacttctttctctctctctctctctctacacttcgttgcatttttgtgtgtttactttctctctacacacacacatcaccgattttaatctacatcctatatacttctatacatccatctttcatcaaaataaacaaaattagacaaaacaatctggttaacttcaaaggttggccaagtagaagatggagaactccagacacagtctctagacttttgcatcctctgcaaaaaaataatcaaaatcaatcatcattagtcattacaatttttttcaccttgtcaacaacttttgtacatgcattattataactacgttatttaaaaatccaaaaatcaatagaccaaaaaaccgtgtatgttttcttagacataacataatttctaactaaattattctcacatcattgaacttaattaagacaacatgatttatgattaaagacgagatataactaaacctctctgtttaagaacacaattcttattgttaaagttattaacacatatatagcgacaaatcagttcattagatttaagacagcaagatctataaaatggattaaaaactgagcatcatgtttgttttaactccatataaatgtttgaacgatgacgaacagagtaattagcagagactaacaagaatctttttaacggtatacaaactatgaaactagaggaattagaccaagagtattttacctgtaagatgatgcttttatgttcttctctcggatgttgagatatatagatatgttgagtgagaactcaagtgaaagagcagaactaataagagaattaaaaaaaacagtgtttttaacatttgtaagattcagatgtctgtccgaagaaaggagtagtagtatttatagagtgtaaataatcttagtttctctcttaattcaaagtttcaaacggtcaaaaaaatgttaccgtttcacaacgttcatattttgctattaccaagtcaaatcaaaacgttggaactataaaccgtaaacgcactcaagactcttttaagtgcacaaaatgtttttactcattttctattgctatcgatcttttgtattattcaattaatgcatcatgcatattattgtcttccattgatttatcacacttgatgatttatgctgtctaacacttttcctagtttcctcttctttgtacaaattaggggaaatcattacttgtgtccaaagttactgcatttttaggggtttgttatatcattttcattgtaacagagttgctgaatcacccaaaaggagttggattgaacaaaaattatatcaagatactacatttatttttctaaacatattatcacaagtgatttagacaagagagtttaacgaccctaaaaaaaatattatgagatcacaagttccttgcaagagaagattacatgacagatcctaagtgtccagagatctgatccaccaagaatctaattgagtgtgcaatgaaacacactgctaagcatctgctcgttgctgattcagtcatcactagtaaaatcatgagtaaataaacaaaaacgaaacagcatgtcaggtataagattgataaatctatgcacaacctaaggcagattcaaagattctgacctttaagagcaactgcgtttgaggttaaaacgagcatatctacgatgaagatcacagaaactgggaattcccagacctgtaaccagagttttattaaagacatcacattttagcatttacagacctatatctacttcggtatcatcatcggtttaggagcttagcatgtaagcaagaagaagctatgtccattatagaaaagattctgaggaatgattacgaaacataccggcatagcaaatagaaagatcttgacgtaactcgagattaagatcgttaaaagaatctctttccctctgcaaatcatatactaacttattcagggcacgtaaagataagactctggcgaataataaaagaaaagcctatataccttggcataaccagcatcaacttagcagcaaatgcaaatgagaaaacaaatgcgaaattcgcagatagtacattgaccagaacctgtaaaatgcatacaattttaagttctcatcaacccaaatttaaacaacgttcaagagaaaagaaccaacctctagagattcaaaaagaaagctcatagacacatttgatccgtcattggttcttctcagtagcaagcttctatcttttgatattgttaaaggctctctccaaaatacaacttgtatagagtatattaaatctaaaggatacaagtatctagaagaagataagccaagaccaatttccataatagatgctgccaaattgttaaaccctctaaagatcagataattgtagattactatttagaattcaaactttacaaaaccaagattcacaatatgtttacctgaacatttgcagattcttgattaacaacattgtagagtaagtgtctataagcctttgttttgtgaagaatcaagtcgatgaaaataatctgatgattatcaaaacacacaaaaaaatcaaaacttgatgaacacaaaagcataaaaattgaaacttgaaaatagagagacatatagatatagaccaatagctcacactcgacatattcgtctgctacttcttcgcaattctcctaccaaaaattgaacatcaaaaaaagctttaaactttggggagattacaagtagagattaagaaccctaattagttttggtaaaagcttacgcatttcatgagacgaaaatttccaggagagtattgtatgaacaaagatttaaccttgtgcccacactctacacacgtcttcttctctctcgccatctctctgtgtctgtgactgttgtctctctccttctcgatcggatcctttattcgggttataacttgggccataatgggcctttatttgaaccttcttctgggcctctattgactatcgttgtaattaatacaagaaattgcattcagattataatattttgggaactttaatccaagtcactgtgactttaaaaatgaaattaggaattcgtaagtttgatggtattacattagtttagtctattaggtttcagctttgtttttgttgtttttggcttaattttaactaaaactcaaagataatgcagataatgaaatcaaaactagagttcaaattttcaatttttgttgtattgaataaatattctcaccaatctttacttcaataaaaatatatttatttaataacactaggaagaaactcgactgttacatcaaggtgaaaaagaagaacaatggaaaccaaacaagagtaaatcaaatcttaattaaccaaccaaaaacggaagtagcatatgcttgactagttgatatagacgtttagtgatgatggtgtctgaaagagtctaaccaccttgtgagacattctaaaggtgacaactttagaacattgagtgttggtccgaccacgacttggagcttaatcccacctggctttgagctaatgaataatggattcatggtttggtgagcttgatgagatcgtggcgtgtcttgtgcacggctattggagaattcgggtcacagtattagaattcaaggtcaccgctgatctagtagacatagttgaattcattgttgtattcgaaaaggagacggtctccaacgtggaactgtttctctttactccagttgtaatagatatcactatcgtaaacgctccagcttttggagtcactaaccttgtagatattttggatatctatttttcgttatgatggaacaatatatatctcttaaatatgaagttgttttcaaatttaggtgttattttttcttttctttatttaaatgcagtttctcttctttacctagaaaacacagttagcaacaaaaaatccaatagaaattaattattggattctatatatgacaaactaattatttcaatttcgtttaaatatggcacatccaatagaaataaaaatccaaacaagtcacgtacggatgtacggacgaacggttgtgagctatgaacaaaacaagaaacaaacgaaagtaaatgaaaataaatagtagaaattttgtttttgggataaagtaaaaaatgaaagaacatatcatacctttcatatttcttttttcaaaattatcattataaactgaaattgtccttccatagcttctcttttttgttctctgtccataacctacaaatctctttaaaccaacccaagacaatagtaaccaaacaaactaaaattggaccattggtagggaaagagagagcgacacttttgaaactgcccattagcttagaatgtaccatgaaactttgtcagcttagctacagataggcacagagagtacaattcataaaattttataagcttttttctccttcccaagagtatacatctcaaactagaaccaaaacaaagttaggatacagagatgaacacttttgatttatggatcgttgtaagcatttaatttgacaatatgagtaactatagttaaaaactcaagattatatgaaaattaaatgattatttatattatttataagcttaatttaacattgaaagatgggggttttctattcaacatggtaattagggctcaaggatcaacatgttgaaacaaaaactcttaattaaaccaatatatagatataagcccggttaatttcccactacatattccccaattgccaaatgatctaatgagttgaaagttggaactaactcttaaaagaaaatggtgaataaattactccttagttcttattttattctatcttcaaagctctaaagatttccctttcctcttatattcttcatcatcacttagctgcatagccgaagaagacgatgccatttcgccacgtggcgacctccaaaatgattgatcatcgtctctgatcacaaccggagacgaggaagagtaccctgctactcccatttcgccacgtgtatcccctgaagatgaagactcttccacgtcaaccccaaacagcctcagcttcttcgtcgtcgacggctgaggaggcgccgacggaggtaccctccccgctggaaaaactggaaccgagtcataaaccaacggctcagatcgaccaagattccactgatgatgttgatccaacggtgatcctgcgtagtaacgcactccattaccattaacaactctaccataaccataccctaaatattcccgttcttgaaattggttctgataaaacggtggaaaactccggtatggcatggaatattccggcgtcaccggataaaacctagccgttggatatgtcggagacccgaaaacgaagttatgattgttaatgttgtgtacgaagtttatctcggctctaggcctccaatcgatgaacattattttccgtcgtctctccggttgtgcgttatcgtcagggatgtagccacggtagaaagagacggtgtctccggcgaagagtttcttctccttgacgaaacggctccatcctttggtcatcacgtagctttggctactgttccaatacgagtaacgaaacctccacatcttgccgtttttgtcttggaaatccaacactgtgccgttttgattgtcctctaaagggaagaagttctctgcatgttgctttggaatcacgagccggtttagtttaccgacgtcacttggtgtcaacactttgtcgaacatgtgctctctcctctccgagctgtagaagtaattggtgtggtcggaactgctagctctgatctcggcgagttcttggtcaagattcattgttgagatattcatcaaaagtatcaagctgtttatatatggggtcttgagaagattgatgacccaatttcaagatctttcaaaagtatccaacttataggttcttgaaaagaagatggaccaattcaagatctttcaaaaagtattcaactttatttttatggatctgaatgagtgattcttgacaagatccaatacaaaatccttcaacatacatgaaataattttattagaaatcaaataaaaatcatcaccccaatactaaggaaaaaaagtaatacttcaatcaaataattaaaagtaaatggaagatgaagtgaagaacaagaagaagaaaaaaagctataaccaaaaaaacaaaaagtgaaaaagaaaaccctaaatccagaagaagaagacagacgtactctttcactctttgtgtttgcttcttcttctgatcttttcgttgactccaaaagagaaataaatgaaaatgaaatcaatggtttggagttaaaaaaaaaaaaggttctctctctatctttctctctagatgactttaaggggtgaagaaatatagtggcttgagagagatttcctcgatgatggagatgaagatcaaatattagagaagagtaaaggggcccatgaatggtgtggttcgggtcatgtgagagcttcttgtccttttcaattagctatagacttggggtaactctagctatttatatagatatacaaatatatacatacatgtattgtgtcaatcttttgtgagactatttccttttattttgatatctgtatttttattttcatctttattcataccagatcttttgtatttattattttctgtttgttagtttcttctaattagttctttacttatttttagctaattatattaaatcatcatatattataactaatttgtgtataccgaagatagaaaaccacacaaaagtacaacatgaagatttatattaactataactagatatggctccacacatatgcttacacgtgttatttctgtatcaaaaaatgtaaaaagacatgaccaaattaagaaaataggttacatgataggaagttatattaaattatattagaccatgaaaaaatgtttgtcagtttcttctatctagttatttttagctaattatattaaatcatcatatattataactaatctgtgtataccaaagataggaaaccacacaaaagtacaatatgaagatttaaattaactataactagatacggctccacacatatgcttacaagtggaactagctaattttagtatctatatatgtatataaaaaatgtaaaaagaccatgaacaaattaaaaaaatagattacaagattgacactagaccaaataaataactttttaatctatacatgtaagaaaatcattaaaaaaaaataatattaggtttctagatagacattagaccagctatattattagtaaagaaaattattaaattaatctataatataatattaatctgaaagttatggaaatattacttttaataaatttaaaatttaaaatattttttctctattttaaaaatataaacactaaaacatattcattttatgtaaaattataatgagacactgtaaattctaatgaatatcttagtttttttaggtttttcctaagaatgctgaaaaaaataaaaattcatttaaactttttagaaatggtcttataagaaggtttaagaatttcttataagaccaattagtaatttcttataagaccatttctgaaagtttaagaattttactttggtcttttggatttttatttataagaatttatttactttggtatttaccattgatttaattcttaaacattttcacaatgctttcttaataccaaaataaaactcttaaacgttttcacctgaaattgttaaatcaatgggagaaaaggttcgaaacatttctacaatgtttcttaaaacaaaataaaggtattttgtaaatttttataactgtgataattttaaattataaatcttaattattcaagattttttcaattacttactagtaaatatttttcaggggataaccacatttgttgtctaggcgataagcaataaaatcttctagatattttaaatataatatttatttgtttttggtaattggtttagtatctccaattttaacaactggatatcaatctctctcttttttttttttgaaaccacaccaagtggatttcaatctaatatctcaattaaaactatatctgtatacttgtcttaatttgtcaaaatgtaaacacgtgttaacttcttacagattttatttcatcatcttaattagttaactcatatggttatgaaataatgtattcttctgaccctttttttttgttaaatcttctgacattttccgtaattagatttcacctgtcagaacttagcaaatcacatggattatcatttatgtaagaaaatcataacaaattttgtccaatttgtctgattatgatttttacaaaactcaagtggaaagtagctctggttttctatgtgtgtccatgttttgtggtacccaacattatatgcatcaacatcaaataacaataacgcattttgaattatatatacaagtcaatccttttgtccaaaaaaaaatatatacaagtcaatccatgtatgactttatgattttaagaaatctaggaatgcatatgtatttgttgtcaatttaactttcgggtattagcttttgttaacatgttataatagaatactttttctttgtttgcatgtaaattatttcactatgtggtgtttttctgtgtccgaccgtgttgcaatataaattacggtagcacacgttattattattattttttttttggacaaaatttaaattcaaataaccactaaaccgggtccagtacaatcgttttaagagaacacttagcaatctcatcagcttcgccattgtgtttccgagagatgaaagaaaaactagattgcagaaaagtagaagataaactcaggatatcgtgtagaatcccgtggagttccaatggaggatcccccaaattgattgcgttgatcaactgcttggaatcggacgctattacaatgttttggatacccaaagtcgatgcatggcagagagcttcgtggatggcgagagcttccgctaaaagaggtgatcgaacattccttcttgaattagatccaatcctacttgtttcagtgatggtgggattgaaaatccatcctaaaccaaccaatttatgttctttgttccaggcagcgtcggtttggcagatactagtgttgtttgagattgaaatgattttccctagggtttgctgcagaggtcggatatgggttgtattctgagctaaaagccactctcgtgctagactgattgctcgagccagagtttcagagggggagctgaggcgatccttgaagattaagtggttcctagaaagccagatcgaccagagaatccacggtaggagaggtcccgttcctacgccaattggtgggaggcaaacgctcagattaactttcttaattagatccctaaaggacacagtggtattgggatccaagggctgtttaaaaggcgcgttttgccagatttctgtagcaaaacgacaggtgaagaacaggtggaaagatgactcctcctctccgcagaaagggcatctcgcttcttcattgatctgtctaaggcgcaggttttctccgactggtaaggatcctctcatagctttccacatgaaaaatttcatctttggtgaagtgttaattttccaaatttctttggtccacttgaaatcagtcaccggagacacatgttggggacttaatggaattgaacttatgctttcatagtagccggagcgtgctgagtatgccccattctttgcagggagccacgcataagagtcctctgctccaagcttacttagatggatctcaaggatttctatttcaaattctgggatggtttgctaaattagacctctgtcccactcaagtgttgtaggagaaatgagctgcgatactgtccacttgtgtgatgatgcaggaggagggcccataggggtgataggagattgtagggatagccacggttcttgccacagagaggtttgtttgccacacccaatgactttaccaagcttccgttttagtagatctctaccaatacatatgcttctccatccatgtgaaatggtcgcaggtggtttacaatctaagaatggcgtagaatggcagtatttcccaagaagggttctagcaagaaggcactgcggctttgtgagtattctccagctctgttttgccaacaaagcatcattaaagcattgtaagtccctgaaaccaagtcctccctctcctttagattttgttaagtttagccaggagatccaacacattttcttcttgtccatactagaatcccaccagaaccgtgtcaaagcagattggatgcgcttatatagagagcagggtagtttaaagcaggacatcgtataggttggcattgctgctagaacagacttcagcatgatcaacttcccagctgaagataggaatctagatgaccagctgcaagccttttggcgaatcctgtcgacaatcagggtgaataaatccttcttctttctaccaaagagctcaggtaaacctaggtatttgcccaagcccccctctttttggattccgagtaatagcttaactctatctcttgtctctacacatgtttttgcagagaaagtaactgctgacttttgagggttaataaactggcccgaagcttgttcatagtgctgcaggatgagcataagagtttcacagtcttgagggtcagatttgcagaagaacatcgtatcatctgcaaatagtaagtggttaattcttggattgttcttccccactttaatgccagtaagatcacctctttcttgggctttgttgcagagaccagagagaacttcactgcagaggataaaaattaagggtgataggggatcaccttggcgaatgcccctttgtggtatcactgaaccttgagccgatccattaaggaggtaagagtaagagaccgttgttatacattgcatgatccaattgatccaagtactgtggaagcccatcctctccataactagttcaatgaaatcccactcaactctatcatatgccttactcatatcagtcttcacggccataaagcatctttcttttgcctttgaattatgtaggtagtgtagaacttcatgggtaatcaatacattgtcagcaatcgcccgttgaggaacaaaagcagattggttttctgagatcaggaagtgaagaattggctggagtctcttggtgagtacctttgctatgattttgtagtagatagagcatagggcaataggcctataatctttcatagtttttgaactcgtgatttttgggatcagtctgacatgggtagtgttaatgttccttggcaggattccggaggagaagaagttctgtatttccagaatgatttgagctcctactgtgcgccagttagtctgaaaaaaacttgcagagaagccatcaggaccaggggctttgtcagcatggatggagaagcaagcagtttttatctcttttgcagttggcattctcgtaagtttcctattggtttcatctgagatgcaaggttgtagggttgcagctatgactgaccttctttctcctggttttgtagtgaaaattttctgataatactcagaaataaccttcaagatttggtgttcttcataaaaggtagtcccttcttcattttcaataacagaaaatttattgactgctaatcgtcctttagtgcaagcgtgaaaaaatccagtgtttttgtcacccagagtgagccataactgtctacttcgctgtttccagtgttcttcttcctctttgtaagcagctgctagctcttcattgatggagttaataagggttggttcagaatctaggcttgacatggcttcctcaagcttagcacggcaattttgaatctgtttttggctattaaggtgcttttcccggctccaggtaataatagcgtgtctacatctacttatttttttctcaacctcttcatagacatctttcatccagttcttttccactagctctgtaacctcctggatattcctgagccttctatcatatctgaacagacctttttctctttttctattttaggtcaaagaaagtgatgattggtcgatggtcagacccttcgaaaggtaaatattcacttctgcctgagggataactaactgcccattcactgtttgacattgctctatcaagtctgcagaacacaacatgatcatttcttttgcctctccaggataggaagttacctgagtggcgaagatcaaagaggtcacaagtggacataaaggttctgaggtccacaaaggatccttcagggcgtgtaggaccacctgacttttcattggagtcaataatttcgttgaagtctcctgtaaggaactagggatcaattctatctttcccacgctccgttagcttgtcccagatggctttccttttggttttatcaggttcaccataaatgaaagttgcaaagaaggtacgcccttccgcttcaatggtagtatcaataaagttctgactctctgatagaactttgatggctatgtttgtgttccagggaagagctagccccccaccaccaggactatggggagcaactagcagagattccgtgtaatttaaacatttaagcgccttgagaacaaaatcatttgagttttttgtctccatgaggaaaattatatccggggagatggtcttctgcatctccttgattctgtgaactgtcatgggatttcccaaaccacaacagttccagctagctatctttaaggaagaggaggaggtggactttgaaaatccaccttctttttgaccattgcagggatgatggtatgagtaggaggtgtagaactcgacgcaagcagagagttgttggatcttggagggttctgctgtttagattgtttctttttgattatttctctagcatcaccagtagaaggtcctgcagtatctgtgactgtcctccctttaggagagttttggactcccaacatgtttctcttgctggatttcgcacctgccagtcttaaaggacttttattccctggtttgtttgatggtttgttaattgggggtcttcctcttttctttttctggcttggctcaggcgcaggtgggagctcagctggatggattggtaagtcctgggaagggcttaagggtggttcaggatcatttgcagtggtgttttggaggagtagttgattagcagaagtagccgcggtgagtatctgataggcagtctccaacatcaaacctctggcttcaccttgtaacactctctgtttcctggccatactttcagtggggtctgcgcagcttatgtactgaacagttacttcccgcagttcacccatgattgcttcttttgtagggataggtactggcagggggtttgaggattcagtaaccacttctctctccagtgaagggcgtcttgttctcgaagtttcagacatctcctgccaggtaagttctcgtggaacttgtttttctcgccattgaaagtttgggttgggcctgttataatggtccctactgtaacttcttgatggttctcttctgagggaaggagtgtgtctaggagaggatgctctgctatttggggaaacatagccttgtactcctggtcttagcctgtaatcacttctcccattcctgccatctgattttctcttgtagagattgtaatcaccgaggggtctagataaacccgagtgagaggaaagtaacttgtcgtgggatgccctgggattttgtttactacctttgtttctctctgcataattttggggaggctgctcagggggagtgagctttgatgttttgcttaccgcctctactttctttaggccaggacaatcagcttcagcatgagagaggcgttgacaatgatgacaatggctcttcagatttttgtattccaggtaaaccaatgcttcactaccatcagggaattccaccactgtttcttttgtaataggttggagcccgttaatgaggacttttatctttgctgcagctggtgaaatttcatggtccactacctccccagcttccttgcctatggcataaagcatttcttttatccagtagtgcattggaaggccctgcagttcaatccaaaaagggatttctgaggggaaggaaggtgagatcactggtttccacctctggagaatgaccatccactgaccaaagtggtagggtctattatcaaggactttctggaggtcctcttcatattcaaatctgaactggaaacaacctctgcctaggtcagatccagtagctttgcccttaagattccatctgtttgataggaaaggtatgagggaccacaaacgctgggctgagggatttgtgagtattcccataagggtaagcgagttctcttggatcagctccgagttgtctagggtgggtgctcttattcgcttcttaggtggaggtgagaagcttctttctgacctcctatcattttcataaactgacatagctctttccccagagtcccttgagcggttttgactggcataatttgagtaagatttttgactgtgagctatgtcttttccttttgcagagtaagggattctttggtctatacttaggtcctgggaactcagcaagatcacacgtaatccaatggttattctaacgaaggcgtctagggcagagtcttgtcgatacaatttgaaaaggttcttcacactaggtgagagagtttgtcatcatggttgttgagaaactgagcatgacataagtttgaaaaggttcttcacatatagtgagaaagttcaagagatagaaccacaaggttagacataaatgcaagagtaaatgctcaagactttttgtacctcaaacaatcaagggatctggtagttgagctcttaaagcactatgaagccaaggggagaaaggagggtttggaggagaagttggtgaaagctcgaagtcctctgttgtcccacaccttgtgacatgacttctaaggggccgtcaacaccattggtcggtaagggcagtcatcgccggggatttggccggagggagatgccgtctatttgagaaatggtgggaaactttctgtttttggtaatagaaagtagctgagatctggttttttaaaaaaccttagcttcttttaggacatagggaagagtgcctgggaaagaaaaaaaacatacgtccgtacaccttaagaggggcttcttacacgttattattactattactactatttgtttacatgttatttttcttttgcgaggaaatagacagatataattttgttttctttgtttacatttttttttttagtatgatatagttaaataagaatattcaaaaattgaaaatctagtttttatataactgttgaaattagtctagcaacaagaaattagtttctttatttgttttatatactcatattctcgtttttataagttttggtccggatactttacatggtatctttgtacccaaactaacttgcatgccctgaaattagtctagcaacaagaattactcgagttatactaaaaaaatgtcctagaaattaataagtacgggaatatgatttagattttaacttttctattatataatttccatgttaacaagtacctaaagtagcacctcccctactatgaaattatatatctagcttacctttgaatttttctaattgtcctagaaattataaactaatcatcgtcaacacatcttatgtaatatactataaaacgttctttaacaaaaataaaataaaaatatatatactataaaacgttttcgaaatgataacatggtaaaaatatatcatcaaacgattagggtaaggaccagagggaccacaccgcgtccatgtagagtttgtcgcaaaagaacctcccacgcctcctttccttcacacattttccttttaaaatatattatctatttactttcttcaacttgaaggtatatttttggtccttgggggatttttcgaccttttctatacccatcggaaaaagttagggattaatttggtccccgttaggaaacaagcaatgaatcaatggtttatgaaatttcgtagtacgtctaataagaaaatgcgataattatgttgtgtatattcactcttgtcgacatcattgtgtatatagtcataatatatatttattaagatgcagacacttccgaaaaaatagctattctatgatacgaaagtagccggtccagttcattctaggaaccaagaaataactgaaacattaataatcaatgtaagcatagtcaatgatagattaaacttgaaatgtgtgcgtatgggtgtgcataatatatagtcttaatgtatgaagaatgggtcttatcatcggcggagcaaatatagtccagttgcatagaatatagggttctgcaaaatatctgtaatatccgtttcactctgtttttagttttacatagcaaagcaaatgttatcttagaaaaacctcattttcctactgtcaaaaatgtaggaaaatcgtaggaaataattgttgttttaccgtttttcaacgaaatttgttagtaagaagtgtcatgtagaaaatcaaaagtggtaaaaaattttgctcagtatacctttgtgtatcctttacgccatcaactttgcatagaaatgatgagagcttgaactcactttcaagaatattacaagtaggtcttttttctgcgtgtcccgaacttaaatttatactttgatcttctcgtgcaaaccatcatgcatgatgcattccaggggagattgttgacaaaagagtcatcataattacatttgatcttttgatcaaaaacattgaaattacgtttgatctatcatgcagttggtttgatccatttaattcgctgcaacggtagcatgtaggtgtaatagagtggatatatgaagaaaaataagcattagtatttagtatactatgttatttccatctactctttcacaattttttttgtttcagtaagattgattctctaatgttatgtgtatttttttatttataataagtgacatgtagccaaattattttgcttcactttaaataatattcaatattttttcatgtaaaactattaactattttcaaaatcaaccttacaataaatgcttagtcctattacttttgttttgaaaattaatagaatgtaggtgtaaaatagataatatacatgtataaattttttaaatatcacttattaaaaaaggatgaagtattacgcttatatttagatttaaaaaaaaaaaactagagaactaataagatttttggtaaaatatattctggtattaagtgtttttttagtgaaaaggagattgatatacacgcgccaatttactggtattgatatatactgggccaggcccattttggggtgagcagcagatccaactatctgacaaaagaaagaaaaagaagttctccaccacctgacattttctcattctgattctgcaaatctaattgggatttggatttcagaggaaaacaaaatgtggaatggggactcttcaaaaatgacagtgacacttatttataaaaacaaaagtctggtttcattggaaccaaatcgaagcttgaaattattaaaaaaagatccaaaggcagtgttacaaatacaaactcttaatgttcagacaaaacatccccagaagacaacaacaacaacaacaacaaaaaggaaagcgtcaaagccaaatatgagacacgtgcttattcaaaaaaaatccaaatataagacaaattcttgttcttttgcatattcactgcaacagaatctgagattgcagacccaaaaattggcaggaatgttcttgaagaagtcttcttttcatctatctcctcagggtgtgaagaatgtactcagcgtaaagatccctgtgaatgatttcaaacatcaagatttgcttaaaagaaaagcaaattatgtaaaaaaggtaaaaagaaaaaaaagtttacattgagtactgaatggcttcaatagcaggaccaggttgtagaaaatcattcactgcaacttccttgttctcattcttcttgtctgttatattttggttaaagatagcaaaaaagaaatggttttgtttcctaatcaagtattaaaataggttttaaggatacagtcttcaaagaatcgacggatttcagaaagacgatgaggaggaagttcattgatgttagtgatgtgcttatactcaggatcatcaacacaaactgcaatgatcttgtcatctttttcaccctttatttcaaccaaaaccccaaagaattagctacaatggttacacaaacttgaagcacaaggaaacatgaaaaactaaagcttaggatgttacctggtcaatcataggcattaaaccaatagctcgggcgcgaagaaaacaacccggaagcacaggctcctgtacataatcaactttgataagaaattatttcagccatttcattttcttttggtgaatgttgttagaattagactcaaacctgcatgataactaaaacatctatagggtcattgtcttcacatagtgtgcgtgggacaaacccgtagttgtgaggatacacaaccgaagaataaagaatcctatcaacctgatagacatatacaaacacttacgatcatcatatatcctcagatcattctgttttttcaagatttgatatctttttaccttgatgagacctgtttttttgtcaagttcatatttgactttgctcccctttgagatctcaataacctaatttcatccaaaaaagacaaatgattaactctttttcgatcggattgtcacatcatcaagcataaagactttaccacattgaaaatcactggagctccaggtcctgcacacatagaacaatttagttaaaaagactctaatcaaacacacagaatatctttaaaacagtgattattaccgatttcaagatcatgccatggatgtgcagcaaccgatctcttagacaaagatgagagaatcctctcgtttaaacgtggagtagggttctgaagcttcttctgaggttgactcgttttcacttcttctccattcatctaataaaacagagcaaaacagaaccaaacgttagaatcttgttagtcaattttcatgacttcacgtctaaatcaatatagaatcttttcactattgatgctgataacacgatccatcactcaaagatttaacatcagattctactagtacgataaacatcaatcatcttcaagatcgaagttaacaaaatctacataattcagctaaacactaacaatttgtatcgaatttgttcatttctcgatagatcttccgttggatacaaaatccagaggatcaaacatcaatacgcaacaaaagttgagatcaagaaccttcaaaaaaaaaagtcgtaccttagaatcgtttgaagaacagaacaatcttgcggaaagtgtggagaaagaaaagtgacgatgatgagaaaacagtaaagcgcgtgttcttcaattgctacccataatagtatttatagaaagcgagaaaaacggattaagatttaattaattggtaagtaagttattaattaaatatgaatttataatcaccgttcgatttcttataacctagggcccaccgtaaaacactaatctcagtctcttgaacgattctcatacacacacttggcactaacgctttaactatttaaacttttactgatgaaaaacaaaatgaagaggaagcaagaaagcaaatttttttgtaacgatgcctatcaacagaattgcgattggaacgccgggggaagctagtcgtcccgatgcgattagagcagctttcgcggagtttttctcgatggttatattcgttttcgcgggtcaaggctctggaatggcttatggaaaactaactggagatggtccagccacacctgccggtcttgtggccgcgtctttgtctcatgcgtttgcgttgttcgttgcggtttccgttggagctaacgtttcaggtggtcatgtgaacccggcggttacatttggggcttttattggtggaaacataacgttgttgagagctattctttattggatcgctcaattactcggagcagtcgtagcttgcttgttgctcaaggtaagcactggcgggatggaaacggctgcgttttcgctatcatatggagtgacgccctggaacgcagtcgttttcgagattgtgatgacgtttgggttagtttacacggtttacgctactgccgtggatcccaagaaaggtgatattggaatcattgcgcctttggcgattgggttaatcgttggagctaacattctggttggtggtgctttcgacggtgcatcgatgaaccccgcggtttcatttggtccggccgtggttagctggatttggacgaatcattgggtctattgggttggtccttttatcggtgcagccattgcagctattgtttatgatactatctttatcggtagtaatggacatgaaccacttccttctaatgatttctaagttaggtttttttttcttgtgtcttgtgaaacaagaaatctacagttgtagcctactatgggtattttgagggagatatgtgtttttaattgtttttcactacttttgttgttttaagtaattaataaattgattggtggaaaatttacactaatttaaattagattaaactattatgtggggtatacgtagtattctgccatacttaaggaattcatgtacaaacgaattttattggaggcatattcttgagattatgcttccatggtgaaaactgaaaatatatcaaacataatgggacccgccattatcaataatactatgaagatatatatatggttggttggtccatgcacgttctttattttatttttggcccaagcacgttctgatatgtgaatcttaggctaatgattttttagtcgatttaagtattgaacaacacacacaaaaaaaggaattcaataaacggtacttcggtgtcccggtgtttgctctaaacgcgtttccaagtttcttgcacgttcaagcaaagtgcgatgacgagatttgatgatactcacgatgtatattcctcaataacaataattgtgattagtattataagtttatatatataactcatcgtggatttagaagagttatgtcaatggtcgattggtcgtatgttttattgtttttaccacatggaaaactaactattttatgtatcaagaattgtaaataacatgacatttgcagataacaactatttgggagaattctaaaattcgctcgatgatttaattttaaagatctacactaattgtgctacgttgagcaattctctattacaagttaattgtgctacgttgaccatttctctatttaaaaattaaacatatacaaaaactctttacaactatcaaatattctttttaaaaaatcaaataaaaaaaacaccaaagtaacacatccttcgacttagaaatcacaatataaaatcaaaactttcgacttcgaatcaaagccccgagttcgttcaaaaacctcaatttcacgaatatgactcatgaggacctactaagaataaagctaaggaatctttattcaaataaacaaataccacgcgaaacattaacgcgtaaatacacgcacgtcaatctcacgcggtggaacgctcggctcttttagtatgggctttaatgggcctgtatagattaactgggctaatatttttaaaagaaggacttttgtcttgagcccaaaacgaaaatgagtaatttgtttttgttttctgataaaaaaagagttttcctcaaaagaaatgagtaaatgacatattactcaataatttactgtaaaaatgaccaaatggtttgactttgaccaaaagttggaaaagatcagagttgttaccagtcgattatctctgacgtatgatcttgtcgttcactcttacacacaatattcaaataatgtatcattgctttctgaataatatgtttttgtttatattgttcttgtattacagaatttaaacatattgatcggatttgttttgcttatgatgtttagatttttcccgattttttaataagctttgaatacaaaagttaaatatatgcggaaaccgatatatgaattaaaatttcgaaaaaagtaatgtgagtgagataggctgagttttacgtattacaagcgagaccgatgtgtcaatgagactctgaccataggcttccttttacgatgcttttttaccattggaatattaaaaaaattctgccacctttctcttcgttgttaaaagtaaaactagagtcattatacaataaacaagtatttttagtcagtagacgttgatgcaaaagaatacctttaaatttatgttgtagctgtaccttttttatcaagcgtagatttgtcagacgcatggacgatatgagagtattaataaaacgtatatgcaaaatataaaaagaggttgcgaagtgtgaaggcgacttcttcttagtaataatgatgtttcatctttaattgtatttgtttccatttccgtaaccattctaatacggacgtctaaagtcaatttcttaacattattactaagtgggaaacatttataaatggaagtaaatattactcatggttaacttttttcgttttcggggtcaaactgaactcataggttagtttatattcaaaaattacaggcaataataacctaaaccttcatgtgaccaataataatgtcatcgtagaacactgcgagtttgctactaatctaaaatccaaaaagtataagataataattaaaactcccaaaatttcacctctttggtttttcttatttatatcacgtcccttttctttgtaacctaaagtttacacacgttactaggagtcaaaagtcaactaagttcgactaagatttgaccacatgacttcaccgttgatttgctcgaagatctgatgaacggctgtcgctatctcatctgctgatcctaatttacaaccatcttccatctgcatgcacaacaccattcatttctcatctctccaaaactaaacaaaaattagcaacttactaaaaaattaaactaaaattttctaagcttagagtgaaggaaaaaaatacacacacacacacataattgtagatattttctattatggtttctcatgcattttaattttcttaagtaccaaacatttcaaaatgaagattccttaattttcctcaaaaagtcaaaaattgctagttacataagactatttataataatgcttaaactagtggaaattgaaactgatagtttaagagatgattaagaaaattaccttgagattgaaagagtagatgacaaagtcaaaggaagaagagatagtgagatgtagaatcgcaagctttagttcttcaatcgagacaatagcttttaagatctgtcgttttcctctcttacaccgaacttttaagctcacatggttctgtatcaccgtagcctccacttctgtcgtatctccaccgccgaatctcgccgtaaatccattttccgacgtcgtagacacgctagaaatagaagagttagtgcatgcaagagacgaagatgaagaacacgacgccgttttaggagtttcatcagttccatcctttcgtttctcagcttctagagattgcaagagttgctctagttccttgatgaaatctattgcccctcctacaatcgaagcttggtcaccctagagaaacaaaaacgttttcttgttaaagctaaattacgttcttgaaaagaaaaaaaaattacgttcttgtttaatgaacccttaaaacattttgttacccgttgaagaaacgaaggaggcatgagagatcggagagagtttaagtgttcgttcatttgtcgtcttcgattacgttcgacggcaatgtgagtcatcctttggttttcaacttcgtctttgttctttggagctcttgtacgtttccgttttcttttttctttgaccgttactgctccgttttctgttcttggatccttttccgggtcatctgtttgacccggatctcttttgatgtttgtttcaagggtgagacagctctttgattctagggtttggatctggagaagtgattggagaaactgatttggttctgttgttgtaaaagggtgttctatgcattgaagcatttgcagaaatggtatcttctcttccatagtagtgtctgaaatctgaccaaattggtcttctaattcaccaaaactcatcaatccactcataattagcttcaacaaagaaaaaaacaagagagattagttttaggataccattttgacaagaaaacaaaaatctactaaatcttaaagtgggtatgagaaataaatggtttggtaggtgaattcttaagacagaacaaagaggatgtacgaggagagaacattaaatgatgagaaataaagaatgtcgcagcgagaggaaacaataataaaagtagcagaatttggataagctattgtaaaatgaatttacaagaattttgcattgaatgttaatcatatgaaaggaggaggaagaagaagagtaaatgcacaaaacagtattctgtatatgagaataaattacaagagaggcttacatgagaagctttatgagtctctctaatggaactgttttctgaagtaatatttttgtaactttgagtatttagatataggtgtctttcctcaaatagtcttcaaattaacaacttctgctgctgcttcttcttctctctctttcctctaaactaaaaacattcctttaggggttgacactttctaaactgttcttaataaatgcagttttccacatatataaaaggagagaagacgaggaagagaagaagaagaggttcggtgcatatatgtataaaaaaaccaagggtgaaaaataaaaatactatactatagctaaattatctagttatatatatagtcgtcgatatttagtattttacacgcacacatacagtaatatatgtatgtattattaattaaatatttaatccgtgaaacagataacctttcttcttctttttttaacctaaattttggacaaaaatatacgtgggtgtcctgtcctccagatcaaatatttatgaccttgtcctctttgggccttcaaaataattttctttcgggacaatactctttgatttttgttcttaacgaattttactttggtaaatataaggaattcgatagactttgatgaaggaattcgatatttggctcgaccaaaaaacatataaaatactttatctataaaaataattctacttaaacagaaactttgaagattcacactaacatatatacatgtttaaatcatcatccaaaaatcttcttctgtgtttggatatgttggcttcattggtgttacatatatattaaccgttttgaccaaaaaataataatatattaaccgtatttatttcattttcttaccatatgttttgctacaactattagaaattaagtgtatatatataatataactctgtatagacacaatgagattgtgcgttgggactaggaggggtcccgtaaaagtattattgaagagggcagtgaagacagttttgtttggtggggacacgtcttccatgaacagtacttctcactcttattaagacagtttcaggatcagaaaagaagaccaagcctctcttgcttcttcctctttttcttttctatctttagagaattagttttctccaatccaaaaagggttttcatgtcttttacttcaacttttcatttactttgttttttctcttttaatcgagctagaacaagtacattatgggtctttaagtatttcccaatatggtgtgttgacttagtgctataaaaattaagaatgacaatagtaccctttaagaagaggacgaacaatgcacatggccaaggccaaggccatgggtgccaaacgttaagtatcctaataataccaactcgatttcagtgccttggtctgtagggcaaacaacagtactctcccccaaaagaaatttacctttttatttttgtttccttctcccaaactacagatttttattctacctcaaagtcttttaagaacttggattttgtaccatgcataagtgagtccaaaactcacatgcaacctaataaaattgaatagactacatttgaaaaataggccaaacgaattatgaagaaaggaaaatagatgtatgaaaatataacacacaaaatgtttttatattattatagataaagaaaaaaaaaattacaagttttgtctagtacattatccacccaataagagcatgtcacataccaattgagaaaaaagtggagtaaatttttatatattacttagctaaacacaagaatatctataatatatatcattatcaacatatcatatgtggatagctatttcttcagccattataggttcgaatggaaatcagtttgcattagacacgcgaaccacattttcttaggtagttccctacgtgtaacattagacccgaaatagcacttatttatcgtcaaagtaagtatgtagaatatgattttacaatttatagttctatgtaccatccatataaccgaagatacggtactagtttgtttaagaaaaaaaaaagaagatacgatactagtaaatgagaacatataggaatttagacgagcgaggaaaatggtaatgggtttacccacttgtgtttagatcaattccatgaattgtctctcagtttactttattcgatttgacttgtttccagaaggcatgtagagttgacaagttaaatatgtctatacaatctcacatccattatgcaattggccacaaataaaaattcattatttcatctgtaataaatgtatcattcaatattttctgttagttaagcaaactaatcaaattaattttgaagtttttagatatataatgtattacagataacaagaaaatgacttgaaatggtttggttggacctaagattagtaaagagaaaattgcaaaacaaattttaaaatctaatatttttgtaaatctactctccacattaaaaaaattgcaagattatcatataagtcactcaaccatatacagtagaaactctataaattaataatgttgggaccatgaaattttattaatttatagtgatattaatttatcctataaattaatatttattaatttatcgtataagttaataaatattaatttataaaaatatttatgtaaaatacaatactatattctttttaaaatgtttttaattaattttctatatgctttgttgtttgtatatataattatgttagttttttatttttctttgactttttaaatttatttttcaaaatatattgtgtttgtatatccacgacattaacgtgaacgtaaacgtaaacatgaagtttaatccaatttttatttacacaaatcttagcaatgctttttcaaataaaagattttacaaaatcaactatgacagatcaaatacgcaaatagttatgtgagtacaacagagatcataccagttatattttaaaaagagttgtaattgtactttgaacaaaaatttcatataaaaattaattagtcttaaaatatatacttaagatctatgattattaatttataatattattgggactataattttatatagggatttcaaaaaaaatattatcttattatcttatcgattttggttactttttacattggcccgacttgggaccggtaaaatttattaatttatcgtgtttattaatttatcgagtattaatttatagagtttctactgtagctagtcttccacaatatttgaccatataacaccatgtattttatctaacatattatgaaactaggccgttttggacaactaaaacgaaaagaagttggaacaacaaaaggtgaaaactcaaatccttatgtcgatttgtcgatgaggtcaaatgcttgattccccgtccccttcacagttttgtttctcaattttatttcaaaaaaagtaatatcataattataaaaaaacacagagtgtattagttactgtcaaaaattatataatacgaggttgtagcaagttgaatattaatctcgcatcttataaatctaggaagtagggttgcaaacaaaactgatagtttgaatatttgtattggcaatttactggtaataatgttttcttgtaacatttttttttctttctgataatttttagcagatgtctacaagagttccttttgtacaaaaatgagatataaggattacaaaaaaagtagggtaattgttttttttttatatctctgcgataaaacttataacactacaatagttaatatactacaagaaaacataaccatttccaacaaaaattttcaaagaaatgtttggttgaattttttttgacgggattctgacgaaattccgaaaacaatactttatcaaaaatccgttagaaaaataaaaaaaattcgacaattacatattaatcggaactttgtcggaatgatagaataacagtaataaaatctatttttatttatttattttaatactgcgccttcttctgtttaaaaccttaaaccactttttttttatcatcattcaatccgtactctttaaattataatattttcagtataatgcgataaaactagattttccgtagcagagacaaaataagcctaatagagtcaatatctcttttcatgcatatcagagtaatacgtagagtaagtaatccatgtattttattaaactaaactcaaagtgtatcatctttcactttggattttcttccttctgatgcgttcgagaattaggcaaatacagttttaagtaacattggttttaacaatagcatgccgaataagatttttcttattttattttattgaaaatatgttttataacagttcttgttctttttgtaactggtcggttttggctttacatttatccagttattggttttattttgttaaatcatagttattacctttctttaaaatatatcttattttcatctgttgttaaaaaaaaaaaaacttatttgaaattaaatcgatgtaaatatgttatagagagacatcgattccactgcaaatttattgtaaattctcccatgcacagagagacaaactgagaaccaacaacttcgtataaatagaaatatccatatttatcccgtacacatatgaatgaaggaattggaattcctaatgaatcatcaaatactagatacatatatacagacacatacatatcaacgtaaacagaggaatcgtataatgacaagaaaatgatccaatttatatctacatacgataaattgattatatatttttttattttttaaaagatcttatccattccaacaccaaatccaatggaaatcacggctagaaaaatatgaaattgaagaatcttatctctttcttcatatgatagaccttcgtagcctcaggaaagtgttagtaccaagggaatagactttttgccacatagccactatcgctttcgtttttttttccttgtcttgaattaatatttacgaccaacaaatttctttttattttaaaagatttaactatcgaatagtttgttttttttgttatttttagtaaaacagccaccaaatagttgataatcagagttgttttctttcttcatttctgttcggggataaatgttagatgtgtatgaaatattggtatacaatagttgggtgaaataacaatcttgcagagtaatatactatgtagaaaaagaacgcaaaagtaatatactatcaagttgtaaaaaatatttcaagtgtttacggggctggttaaacttctttagattaataaaacgctaatagatacataaaattgctgtcgctagttcatgaaattagctttcataaatcttcgtcgtagttagaggagctgattttgttctatagattggcccaaaggcccataatatatcaacaagcgttaaagacaatatctataactgtaagcccttgcagtagaaattagtaaatctattgggtccataaagtccataaaaagaccttttcatgaaccacggtgtgtgacggtgctacgcgatgttgtttattttcggtaaagttatttaaaagagaagtgaaaacataacttcttctacattattatttttgtgacgtttttaattttgatgcagaacttaaatggatttagtttttctgaaaaattatattctacagactattttttattggtagaaatttttttacttcattatatttctatgtaaaaagagaaaattaagctatatatattttttttaatttatgtgtagaaaccttactcaactacttaaaatgatccatagcgagtaaaacttttctaaacaataacacggtcacaactcacaagtcacaacaatagcatgccgaataagaaatgtggattgccctatcaaaaaatctttgttacccaaaaatcaaaataaagcaacataattgaatagaaaaccgagaaatcaaggataattacgtatccgaatttggttggcgatgaaaaaaatcatccaaatacaaggtaacaggataaacttgtatactataaggctacttttaattaaattctatataaaggtttaaacccaaaataaaaattaaaagttatataaagttggaacaaactctagaagcaacctttaatccaaaaaaaaactctagaagcaagcagcctttttttctcagaggattggtggataatgacgaggaagagaagaagcataccatctttgattaaagataaaaaaataaaaacaaaaggatatcttgtaaaagctttttttgtggcctttttttttcatttcattttcaagccatatttatagtaaaatatggaggacttgaaggtgaaaaagggattctaaaacattataaagttcttttttacaagatatttggtaaaattccaatgcaaaaggattctaaaacattataaaatggaacagaggaaaatgctctaggcaaagcttaggccttagaagtctttagaggtcgccaattaaaaaaaaaaaagacttgaaagacttgatcaatttttattcatttaatttgtagatacaagtgaaggaaaaaactttcaaaatcatcaagtggatgagaaaaaaaattgccataaagaaaaaacgggtccaatatgaaccaattaaggtggctaacatttgttaagtaactaattaaggtggcttacagcttactgatgcaatgatacgtcgtcctgtgtacgtaatcaatgtcttaaataagcagtaataaaaagagaatttatattctccagcaaatttatctttgtttggaatcctccagaaaaggtaatccatattctccagcaaattatctaaagaaatgttattactactaggtaccataaaaccttacaaagagtcggattgtcggaatattgattcgtatactagttatatttcctctagccctaataaatcaaagttttagatattttttttgaaataaaacaatagatttataaaaattgtctatgcattttttattagttaatgatataaattgtaaaagttaataaaaatatattaataccattgatttttaactataaaaaattcttaatcacaaaatgatgtgattatataaatttttttctaatatttgattcagtattaataaaaaaaaaatttcgtctgttcaattttataatgttttagaatccttttgcattggaactttaccaaatattagccaccgttttagctagtttcttaaaaaaaattgaatgcagaaaatacttatgacattgtatatatatgtcggaatggcaatgcccctgattttatcatttttatacaagtaacacttggtgcctcgtccattaatccaacgattgattatcttatgtcgagacaaagcattggttcaatcatgcaaaatctaccttatctatagctttatagttaattaaatttaaatccatttctttatattgtttttaaaaataattgattcatagttacgtcatacgtttttttgtttcctgtaacaaatcggttttgctttctttgattgtctctttcaagataaacgaccaaaacttcaatatgaccaagctttttgacgcatttcgtttatagaatactgatccatttctcttttcgtgaaatatatgttttcgatcttgtccatttgcaaatactttctaatccactaacttgagttggaattgtattaataaatcaacttgcttgttctttccatttttaaaaagatctcataactattttacaatagtattatcaaaaggtgagcaaaagaaaatttacaaaaaaacaaagtgagcaatatataactacatatatagttggtaaaccggactttagggaccaatgaaatttgtagtgcttaagcgtaagcattcagtaaaaatgaattacgattaatatatttgtagtgcttaaccgtaagcagtcagtgaaattgaattacgattagtatctcaaaagataactaaaagtatatacattttagatttatttgttttttataactagaaggagtttgggtttaagcgttaatcttctccatggcccaggatcagtctttgctaaaatcttataaagacgtaaaacatccgctccaccaggaattgaactagggagaactttatagaaagacaatatatataaacaaaacatgcatgatattttatgtcgtaaattcaataatattgatgtggctgaggaaaagctcaattattttgatgtcattgatcagtgatcagtaacggagtcgtttggtcaataaagagtttcaataaccatcaccactttttacgtgttgttactttatatattaaaatgactacatataatggattttcgactttaattactttttaaatatatatgttatgcatgaattaagcggtcgaaatcgtattctaggtgattctgacatgtgttcatgctttcttgctaaaagataagaaactgtcgtggggttcgccatgcaaaaatgcgaagccattaaatataattaagcaaacgcagccaacgaagtaaataaccacgagacaatttcaaacatattttatcaccataattatcgtctttttcattagtttatgttttattttaaccgtttttgtataaagcacacgaattccgtaattatggctgctatataaattccacggtcaaacaatcaagcatgtacaatacataagattaaaattcagctcattaatatttattggtagtatgtgataaatttatataacatgtttttttctagtcacggatttcacgcaacaaatgtagaatttgaaacttaacgtgaatcttgatttaaaatatttatgcattaaatgtatagtcaaaatagatcaggtacaaaacttaaagttaaataaaaaaatattctaaagcaaaataaaatatccatgatttgtgaattcattcaataagaatgacgtggaaaagaagctcgtcatgattacacattccaaagtgtcgttgtgggtgttattagactagtagttttacaataatatctcagtagccattagttatcttgacatcattttagtcaaaaaaaaaaaaaacatgacaaaacagaaggtaacttaaacactcagcggttaggatatctggctttcacccaggagacccgggttccattcccggtaacggagcttttctgaagatgacaaaaaaaaaagaaagtaacaaaacactaagcacataaatggttatggtggaatgaggaattaatgaagaaaacgccggaaacatctcggggaaaaaaaaaaaactggcgtgactttgaaaatgtaacggagattttaaaaaatttacactaattacgtaaattaatttttcgaatatttgagtttggacatctcagagtcctaggcgattttgtttgatgtatggagttgaaagtgacgaaagcaaggaagactcttagttgttgaatgcgaggctgctaagcaagtgaagagaacaggtgaacaagactttaaaaatgatttttattcttaatttgttaaggaactttaaaacaaagaagaaaaaaccatgctttagagcgagcactttggtagagaccccttgtcgtgtataacgatgcgacatttatatatactgagtatttattactatatatagttcctgatttggtgactgcttcatcatatatatttgcatattatgtgtttggatcctaaaaatctttttgaagtgattgagctttcactcctttcgtgtgccatctcctcagcagtattgtaaagaaaaagcaaagcaatagcgatttctttttctggtgggtaatgatttataaacaaaaaagaaatatttaataaagtatataaaacatgaaaaaaataaagtacgaagatgtcatagtagcccaacataccctgtactcgccttttaggaaataaataactattcgtgtttgttaacatttgcaataatagtcatatttacagaacaaaaacattgaaataatttgataaaaaaaagaaagaacattgaaataatttccataaattcggagtacgtaatcgaccgtttactaatatgactctcatcaataaggacgtcaaagtatgtcacaccatccacgagaaatcgagaatcgaattatgttgaaacttaggtattgagtaaaagaaaccaaataaaggtattgaaagctcacaagaatctattgtaaactttagtttttcaactattattattttacgttatttattttttacgtaaaaagatgcagattgaataatttgttctgtcaattaaggttatattcgatactgtttatttctgtttttcgacactgtttattcacataaacaaattacagtatccaaatgaatcccgtaggaattaaaatccccaaaaaaactaaacgttgcaacacaagtacgaaattgtccaataaaagtatgaaatagtccaataaacaatgaaaacgatcgttatcttctcttcttcatatttcattttttgaagacatatcggtcatgattcttgttgaacaagcgtgtttagggaagtagatcaaggagtcatcggaataaccaaaagttgaccgttgttaacatttgtacggccttcctcttccttttcttcttccaccgtattggtaggcaacttcatgatcttacactctactatttgcttactcctactccatagaaatatatataaaccgatcacaaccaccacagatccaataacgctacaacaataataaaagtttagtccataacatgcacatgatataatatattcaagaggtttatatagttaaaatataaagttaatacagttagatttttaataatataccttcccaaataaatctcacgatgaagaatcaagaaatcgaacacggttgcagacataagcacgacaggactaaatgatgaggaaacgacaggtccttgttgtttgatacaccacgacatgcccaccgtacacataccttgtgcaaccactccctataaacatatattaacaatagatcaatatctgattattgtgtggatccaaattatttatatgtctgacgaaacattgtcttatataccgctataacgacggtgatgatggtaagctcatctctaaggatccaatcttccaaatgtctagtcttaattaaactaagaagggcgcattgaagcgtaccaaagaccgacaaaataacggtactcgagtatggacaagggtatttcacgttgatcttggcttgtataagcatccaagaactgaaaagaacaactccggtcaataaaaagaaacaacctttgatccaattctcatgtcctgtgtggttatttgaatttgctgcttgttctggagagtttgttaatggaatcccttgatacatagtaagaagtaaacctcctactaagcttatcaaagttccaagaacgacaccgtatcctatttttgttttcaaacttagcttttcgaacctgcaaattttattttttcaaaataaaaaggtgtaagattacacttgagatgatagcgtatatggcacttttctttattttaacaataattgtacccaaatattaaagccataacgaaagtgagggaaggcattatggcccagaaagcagatcccagcgttgcagacgtgtaggacagtccaagcaagtagaaatattgcatcaagctcgccctgaaaaagaaagatttatgataaacgattatatttcattttatcaaaaacaaaaaaaaataacatcttacataaacatacaaaaaaagcaataaagagggagagaatagaaaaacataaggatttagtggattaaaaccgaaacttacccaaaaagggcactgacgaaaagctgacatgagatgcttagagttagctttggtcttgttttcctgaacaaatcatgaaatcgaatatttattttgttaggcacacacaattctgattctatatccgtacatagaaaaacattcatgaaactctctagtatatactctttattgttttcaagttaatattcttttatcttatgaaataaaataaattaaataaagtaattagccagaaaaaaaaagatagagatgaagcatcaaacgtgatatttgtgtcttcttgtattttcacaacatagtaaccaaaattcaatttttttaaaaacactgccacaaacttttaaatattttattattttattaaggcataacgaaatgtataaaaatctgaaagctacgaaaataaaaatcaaagaagaagtagtaaacgtaccgttcccaaaaataagcgactggaagaaggaaaagagtagatatacccaaacgataagtagcaataaccatatgattgatgcctccatcaagaactttcttaactaaagcattaaccattcccgcaatcatgttagaaacaattaagactatcattggtgcccactttccatcgataaaacccatgattagtataagttaattacttaataaccaaaatgatatctctttctttctctctcagtctcgctctctctcttagcttttactctatccttctctctctgtctcttcttcagaaacttgtttgagtagtgaaatattaagactagaggtggatatatttataaataacatggatgttgagttggagcccatttctttctaaaacaacaaaaaacaatgaaaatatttaaagaacgagtaggtattgaattcttttttaactatgaaacaaattatagaactactaagtaaagttctttaacagaaaaaaaaaaaaaactattaagtaaagttatatgaaacatttgttttttgaaattgtaggtatagaatatactgtttttctcggtggaagggattagtaatatatatatatatatatatatttatatgtaactgtgatgatg

SEQ ID NO: 510 - DNA, 90596 bp, Arabidopsis thaliana
aagcttgtttatgattcataggaaatcgtggagaaacaatcaccagggctaatgaaagatgccgaacgattcttaatcttgagcaatattgataggttatggaaagaacaccttcaagcactcaagttcgtgcaacaagctgtggggctcagaggatatgcgcaacgcgatccactcatcgagtataagctcgaaggatacaatctatttctggaaatgatggctcaaatacgaagaaatgtgatatactccatatatcaggttcttcattaaatcaaaacctctgcttcacttcacacaataatttactcattcaagttttgattcttttttttttgtggcagtttcaaccagtgcgggtaaagaaggacgaagagaagaagtctcagaacgggaaaccgagcaaacaagtagataatgctagtgagaagcctaaacaagttggtgtcacagatgagccatcctcaattgcaagcgcctaagagcggtaaacggtaaaatctttttgggtacaagagcgggaattcgtttttgggaaaaaagctcggtgaatacattcgagaaagctggaatcactaaatttgttgtcaatctcatttatctgtatatactactactagtacattgagaaaggatcacatcaaaaccagatcaaagaaaacttccttctcttacaggatcaagaatctctcggaagaatctgtttaagtagtaggttgagatcatttcctctagccttgataccgatggctagagccgtcttgagcttaaccaactcacctaatctgagagaggctcgtttgttgtcccttacatagagaaccggaacgtttctcgaagcagctaagttgggtatatgcttggtcagcatcctcggtttacaatctgctactaaaatcactacctgtgatgaattgaaaacagtctctttctaaatcaataccatttttctaatgagagttattagggttgtagtgtcgtacctgaagttgtttagggttttgttgttggtcactagtattgttgggattcatcctctcaagaactcgagtgacttcgttgatcccaatcgctatttgcttctgaaatacatcacaacggtggtgtttgagaatcgaatcttgaagaaacaaaaaaaaaccatagcaagagtagtaagtagtaaccttgagccatatcttctcaggtaatgagttcacattcgaaagcttggacgtctcaattcctctaattcaccaaaaagagagaacttttgtaacaaaaaccgatatttgtgatggtttttttttaagggtttggagagagtttacctctgaatcaagtcgagtagatgagtaagacgttcgccttcatagtaactacaagacgaaccggagaaatcgaaatccttagaaactctttggaaacagacttagagagaaagagagagtattgaattggtttctataggaagaattaggtaagcttactcagattctttgacgggattcgaatcagcttctatcttcttctgagggtttatgggtgtgacgcctctcatcggtgatcggtgttctagtgatggacaccaactgttcgacaaaactacccagttcgaagttttttttttttttttccacattgacaagggtctatctcgtaattagccaaaaggcccaaaacgaatgtaaatttataggttataagatgaaacgttaacataacaatgaaagggtcaatattcaattttttgactagaagaaaagaaagtaactcgtgacaaagtttgttttttacaataaaaggttctaaatgacatgcttaagatatgagacaagagagaggccacatctagttgttttacatgttaaatatattacaaaatggcattatgatacattttactactcattgtccaaagaggcggcatactcctagaaatatttcacaatgaaacatcaaaacgatgcaagacatcaaagttgtgtcaactattcactaagttctgagaagaaaaacaaaaagaataaaccaaaaaccaaacacatttctctgcaactaagctttttcttcagtccctcttgcagctgcaaatcatcaatcaaaaatccagtatgagcaaaattatattttgcacatgaaaacatatttttgttcggttatcaagaaaaggtttaaacctttacgccattccgcgcttacgtttcgctttttcccattgatcaagtaaacaagtgacaccttcttcaagtgtagccctcttatcttctttgaagttccatagctctgttgtaatgtaccttccactcgggttatactcgtttatctccaacaaagctttcgtgaccgcattgtaaggaccatctcccaaatctgcctttagctccctcagcttttcgtctctatcatctatcacttcctaaacacaaataacaacaacaacacaaaaacagctttttaatctttcagagagattcgacataacaaaccgtgtcaagaaggcggtcttaccacttctctatcttgattttcgagcttgacccgcttgtatggatgccaatctggatcgttgatatagtgttcccaaagttggagaacttcaactgctcggtcctccacatcttcctgacaatacttctgctgcattgcatccacgaatggtttccttacgagctctcccatacacttaacaccgatacttgttttctattctctcataatctacataaggcacatgaaacaaacaaaccaaaatgtcaagctttctcagaggttttctgatataattgaaaagaacaacactttgatacatacatttaccaattctttacgagcttcttgaagctcatcattggtcctgcgctctctaaggataagagtttggttaaatttattgaggtctgcgagttctgcttccttctcaactaagtctttgaagatgatgtccacctctttcacaacttgagcatcgccatctgatgccatgtgcttcatcacattgagctgtcctttcaactgctcaacctctagctcaatcgcttgtacctgatctatctgtctttctagtcttatgattttctcatgaagctcctccttttgcctctgttaagtacacatcaacacatggacttatatcttaacaaaaaagagagatacagagagtaaatgttttacctgttcaagatcttcagacaatttcattctctcggttccattgtgcacttggggctttgccaactcattacctttgatttcgagtttcttcttctctgactccaacagcttcgtcaatctctcatggtcatcaactatcttttgaatatgcctcattgttctctcttgtatagcattcagctttgctgattcttctccttctcttccatcaactgattaagttcctctgacttcactgaacaaagctcctcaatctccttcacgtcttttatcttctcttctacaacttgtctcagattcttcacaagcatttgctgtttcctcgcctcttctttcgtaagctcagctatagttttgagttcacggtcttcctcaagttttctccgatgatattattaccgttataatcatcagcaccagctatccacccgtaaagacctaacttgggaccgtcttttttcatccagtccttctttccatgaccatctactctataagccttgtcaaacaaaagaccattgtttaatcctctgagaatatactcatcccttagcttcgatccactctcacccgcgggtcgaccatcttgtgcctttgtagttggaatattaacaacaatgcctgtttcagccacgtatacacaatcactaaacacacattgcaattcaatcttaagaagaaaagtaagaaccttaaaagttaaaagtgtgtgtacctttccaaggatgcacaagcttctcgtgatgatcacaatcttgaatagggtttccgaactagaccaaacgaaacgaaccgaactagaccaaacgaaattgaacatttcgtaacctaatccataacaactcgagatgcagaaatgagtaacagagcattttagtactcaattccaatttgaattcgaataccaataaaccaaactaaggctaactgcctagtgcctcccatcaaattcaaatcaacgccataaccagattaaaccggaaacaaaaccgagaatcaaacagagcaggttttgatgtaattttctttaatattatatttttatcacaattaattttattaaatatttttgaatttttttggtcaactccgggtttaacgtttggttttactggattctgacgaatggtatactaaaatatgatggttatagtattgacaacatgtctatattagtacgttaattttagtctatgtgaacatacgatacattaaattagtgttagcttatgattttttttatcttatgttctctaaaatctaaatcataaaccattaaataaataaaaggtctaattagttgggagtcatgtgcttattcgagtaaactattatttaagtagtgcttgacatgttgtcattttgcatctgtttgtttccatgtaataagtatagtcaactctttgtgattcaaataatgtcatgacatacatcttgagtctcatttgtttactacatacagaccaaaatttgtctgtcgcgaaactttgactatctctgaatttcccctgttttcctcttttttttctactaaacattacaactggattaaccaaactcaaatcataacgaattagtcatatataacctcacaattaagatccccaaaattgtaaggaatttactcagtggatctatctttctttagccattcgagtttactctaatttccctaatggagactcaagagcgtgatcatcgacaagccatagaccgtaatcttggaaacgtttcattttcctgtcgtaaccgataatgtagttattgtggactatgacatgtttcccctttgtctcttgaacccatgcctcgttcttgaagtacaatcctcctgttgggaaagctacttgagaaagcaagtagagatccacctgcagaacaaaagatcacaaaacaagtcaaagttaccaaagagactaaaagaaaaaccataaatccaacattaataagtagataaagtagaaatagaacatgaaggaaacaaaaacatacttgatgagctgttttgttaagtgccaagttaaaagcaggctgatcatttgctttaaaacggatggattcagaccaagcttgggattgaagttcctcactccatttcttcattagaagctttgcaccattcgtaggtcgcaagtaaatcatgcagctacatatataagtctctccgtttcgatccggatgtggtaaatcatgagagtgattcaaaggctttatctgacacaaaaattaacccgagaataagataaataaaacacactaaatttccaaagatgtgtgaagaattcacatacttgaggcatgtcatcggtgaaatacgcgtcatggcttccctccaaatacagaaatggatcttgcaaccaaaccatatcaacatcgttgtacataacattgtaacctagctccaaaatttgcaagagatgttgcggccttcgagctgtgaaattgaagaaaccctagtcggatatgatgagtaaattagtgaaaacataagttttcttcacacacagaaataataaaagcaatggccctagaccaccaatctttttttttcaaaatgaaggccacaattttataaaagttgttttgtttagttatagttaaattaattttacttttactctctaaccactataagtaaacggtatgcttagatttttttatctttattttttacttttggaaaactgcgtaaaaagaacaaacctaaacagtaagaaatgtatacatatttacactaatatgacacgtaaaagatgttataaaattatttttgggaaaacgatgaaaaaattaagatgtgaaaaatcagattttgttaaaattgtcaataacactttaataataaaaagctatcttaaatgaagaaaaaaaccatgcaaaagaaagtaaataaataaactaaaaaaaaggccacatatttttagttagccttgacccttgagcctctactagtagctactactatatccacaagttgaccagtttttgtcctttttttaataggatcaaccatgaatgtactctaaacacactcaataccgaaatcttagggactagtcaaacttatgatcccagtaatcactcagagctagtcaagaacatccacgatctaagtatgatcaagaacatgaatcaatctactcatttccagctagatctcatgaactgaaagctaaagatatctcaatggtgaaaactttacctgggaaccgaaactgaatgcggttttagaatcgagcgctggaggaataagaacggcgtggccaggccacttctcgttgactttatacagagtaatgtaatcctcagcgatcacgaggactttgtcttgatgcttttgtctagaaacactaatcaaccagttgttgagaaaaggcaagaatggtgagctcacggcgcagactatcacagtgccattcttggccacgaacctagccgcctgagcaagggtatagtcgcgccatttggactgcggagacggtgacaaagaagaagaaagtctatttggaaacaggaataagggagatcctggccagggcaagagtacaccgaggagcaggacgagagcgagaaggagaaggaggagaccgttgcggctaaggagagagatgggacggtctgagattgaagaataagaactaggagaggaagagaatgtactttgtttaagaatatgttgtttctgctccattgttgtagcagtagagcaacaaaatttgaggagaaaattttacaagtttggatcagattcaaaggtggggaaatatataaatgaaaagtttgtaacaaagaaaatagtttctattttattatataaaatatggttaattcataagattgtgtcatatgtcaagtctgtcgatcagatgtttacatgttgagaaaatgtttaactttttttttcttcttaaagagataaaaaagcaaaaaaaaaaaaaaatctgcatatactaagttatatatccattttggctgcgcgccttttgatggctgtcattttctaaaaaaaaaaaatctgcatatactaagttatatatccattttgttcccttaattaaaaaaaaaattaacaaatttatttttacatgtgttgttggtcaattaaattttgtatgcattaatgttttttaagaaaaacatttattatggctaataatactaaattaaaaagttaattgaagtttaaaataataatataatttatttaacattaatttgatgggataacattatatttagcatgaattattattttttaaaatcatttattatagataataatactaattaaaacgggacattgaaatttaaaataaaaatataatttatttaacattaatttaattggataaaattatatttatcatctataatatagtgttttcatttgttaaataaaaacataaaaaatggaaaaaatgatgagcttataagaataaatttttgaatacctatattatattttaagaattttaacgcatcatggaagaattatgtttttcctttttttaatactaaataattgttatttagaatttagatatcatcaataaaaacaagtgtgtagaattaaattctttgataaaatggaatgtacaagactaaaaatttgttgaaaacaaaaaatatcaaatttataactcacataatcacgccatttgttaaattgttttataacatttaatatttatttcttacataaagagtatgtactaccttttaagttttttctatttcttttctaaaaaaaattctaaatgacatttaacagcgataattttttttgttaaactttaagtattacacacaaaactagcaaaactcatataagacctatcgtgaacttctccattaccttccaataaaaagatactttgattaaccattaataaatcagaagttgtctatcccaatgatcaactgctgagaccaaaaagacgatttgtagactttgcctttaccagttgcaccattgatacttgataatcaatataattaaggtaatttaacacacacgaaaaattcacgttagtcaagaaaaaaattgataaaatgtggagtcaacttaacaaaattaagtttaattcagaatttgtattggaccacttttgcttcaacatgtactaaacacagctcaaacagagctaatcaatgaatatccaagatctaagtatgatgtaaacctgttaaaaaatcccattaaagtgcgatcggaccaaaaacaatatataaagaacatattgatcagtttattttggttttgagttagaacttcataaaacttaacaaatctggcaattttcaactagatttcaggaaattaaagcagtgatatctcaaatgtgaaagggaagatgaagtgaatcaaccacgataagctagagaaatttgcgggttaagactttaagctgtacacgtgatagttcttctttatgcttacttagagcatccacattggttggtttttaatatgagtttcttcgaattgtttattagttaattttgatagttttgtagtttagagttttttataatttttatggttcaatggtggaatttttaagagggtttcttaaaaaaaataaaaaatggttaagtacataagttaatagatgaaactcatgaaataaaactcattactcgattgtaaccaaaattgttaagttcggaccaaacactcacattcatctattaatcgatatggttgagttcagaccaaacacacacattcatctattaatcaatatggttaagttcagaccaaacacatacattcattcattaatggatatggttaagttcagaccaaactcattaatcgataaaactcacaacagtacatacatttaaagaatctggtatcttccacaattgatgttggcacaatttctattcttcccagtcctgcaaaatgaagcaaatcatgacattaacagatgaaacaaaaccgtaaactacaaacattcagaccaaacacaaatactcatctcattaatccataaactgaaaacattgagaccaaacattcaccaaacacaaatactcaccaaacacaaatactcatctcattaatccataaacagaaaacattcagactaaacattcagaccaaacacaaacattcagaccaaacattcagtctcaaagttattacacatatactaaaagccgaaatactagaagctaaaacttaaagccgaaatactagaaggtgaagtacattctgaccaaacatgcaacattcagatagaaactaaaacttaagacaacatatcatttattagcttgttcttaagcgccatctctatgtcagataaaggctctgttttgccacaaccatgttttttgagcaaaaatttcagaaaactccaagtgcattaaaagagatatacttgagacagagctggattctacctcttggtaagaactcatgagatagtcacatgatagaagctcctggtgttacaaagaattcaacaatataaccacaagatccggtttgaagttgatttggtgaacaatctcatcgtcgatcatcattctggcggttgtatattgagtatatgtggttgctctcccgatttcatgatcaaaacgctggatcaaacaaatcaagttgaatcgcctttggtatcgtcgacggagaaaccaaacaaaagagaaagcaagaaaattttccttttgtttaaaccaaacaatctatcacaattagccacgtatgcgtttctaatgagtttccaaaaacctaattttaggaacgttcctacaattattgttgaatttttatttaatttaggcccactattctcttagaaaccaactaaaaactatcgatggacttggtcttaatatccatatatggatggaaagttccgcagtgtccgcgagtctaatctagttatattatttttaaaaaaaatcttctgtcatcacgtacatataaaacatattataagatttttgtgagaccatcttcgagattaacaaggacttctaagtggagcattttttagattaacaaggacttttgaaaagagagagaaagagacttgaaaaggagctttgagatttcagatccaacatttcttcttttttcttcccaatctcaagttatacgaccatggactctgatggagtgtcagtaccgttgatccacgagcatcttatgatgccttgtaatgatttgaggagaggtgattgttgtgagcgtttggaagctatcagtgatggctactattgcacaacctgcgatttcttcgtccacaagaaatgtggtgacgaggcctctgaatgcattgaaaatccatttcattccaatcaccctcttcggcttggttttctttctcgtcttcagcgccaacattggcttaaagtagttcgcagttgtgatttatgtggaaagaacatcggggatctattctatcgttgtgagatctgtgacttcgacatggatttacactgtgccaagtatccaccactagaggttattgacattcccgagatgcatagccacaagctcaaccttctcaaagatcgggtcgagtttgattgtgatgctaaatgtgggaagattggttatgggtttccttacgaatgtcatgaatgtgattcaaagttccatgtggattgcgtaaggtactcctcatcggaggaagtaaaacatcctttagaggtaaaccactcttaccactccttgcaccctcttaagctcctcatgggtcaaccaccagactactctgatggaaaatgtcgtctttgcggaagaaagattgatgataaattgttttatcactgctcttcttgtaactttaccttggatatgcgttgtgttttaaatccaccaccaaaatctgttttggatttgaaaactcatgatcatcaactcaatcttctcccaaggctcattttttttacatgtaatgcttgcgggctgaatggagatcgaagcccttacgcatgttttcaatgtgatttcttgatccacaaagattgttttggtcttccacgcctcattaacatcaatcggcatgatcatcgtatttctagaacttctcttattggtattgtgaattctgtatgtggagtttgtcgccagaaggtggactggacttgtgggggttattcttgtcaacggtgttcgacctatatcgctcattcaaaatgtgctactagagaagatgtgtggaatgggaaggaacttgaaggagtacctgaagaaatagaagatatagagccatatgtggtaatagatgacaacacaatacaacatttcagccacaaagagcattacatgaggctcaatgttaatggccttatgtgtgaggtgaacaagcggtgcaatgcatgcaaccaccccatctctcctcaatccttctatggctgtatggattgcgatttcatcctccaccaaaattgcgctggatttcctagaaggaaatggcatgtgctacacaatgaacggcttgctttagtcactagcgaggttaatattttcgggtgtagtgcttgtcacaaaattttcaatggttttagatacgagcatgaggatacaaaattagatgtcctttgtggttcattttctgagccatttatccatccaagtcatcctcatcatccgttatattgcatttcacctgaggatgatgaagtatgcagtggctgtaacgagaggagctatcatgtgcttagatgcattgaagacaattgtgggtttatcttggattttggttgcgccacttttccacaagtggtaaagcatagaattgaagaccaacctctttctctatgctatggtgaaaaggcaagtggaaaatattggtgtgacatttgtgaaaaggaaaccaatccaaacacatggttctacacatgtaaagatcatcgggcaagtttgcatacatggtgtgtgcttggagactttatggggctcataccaaaaagcacaatagagctatggaacatatcatatgaagtggtgctcaataatagtatttctcgcccaatttgcaggcactgtaagtcgcattgcattccccctattatcttaaagaagattggaacctcagatccatacttttgttctctggactgcatagagagtttcaaaaggctttggcgagcaaagtgaagattgatcgttaaaccccattttgaagccttacttatctctttacatgtacattttccttatgagttgctttctttatgcattatctaagaatcttgcaatctcaattttttttctttagataaagagagtttggcatttttatcttaacttttgcaatcttacttatctcttgcaatcttacttatctctgtttttttttcagttaggttgaatttttattgttatttgaatacagtttggcattttgtatcccagagagaatggagatggttatgagaaagctgagtttatcactggataatctaaaagtctccatctaaaacctatgactattacctcttcgcatctttgtttttgtgatgttctttaaagtctaaatcattgaataataaacaaataaaagccagattagttattgtctgagtcatgtgcttgtttgataatgaatgcttgtcatatgtagtatttaagtagtgcttgtttgataatgaatgcttgtcatatgtagtatttaagtagtgcttgtcatgtgttcatataacgtcaagacatacatcttgaatctcatttgtttactcaagaccaaaatgtacaactggaccctgttttcctctgtttctactaaacattacaactggattaacaaaactcaagtcataatgaattagtcatatgtaatataacactcacgcatacctttaaagatcccaaaaagttctaaggaatttactcaatggatctatctttctttagccattcgaatttactgcaatttccctaatggagactcgagagcatgatcatcgactagccatagaccataatcttggaaccgtctcattttcctatcgtaaccgataatgtagttattgtggactatgacatgtttcccctttgtctctttaacccatgccgcatcattgaaatacaatcctcctgttggaaaagctacctgagaaagcaagtagagatccacctgcagaacaaaagatcacaatccaacatttataactcataagtatataagaagattctatgcgttgattttgaagaaatggaacgtggaggacacaaaaactaacttgatgggctgttttgttaagtgccaagttaaaagcaggctgatcatttgctttaaaacggatggactcagaccaagcttgggactgaagttcctcactccatttcttcattagaagctttgcaccattcgtgggtcgcaagtaaatcatgcagctacatatataagtctctccgttttgatccggcgctggtaaatcatgagagtgattcaaaggctttatctggcaccaaaatcaacccggaaataagagataaataaaacactctaaattttccaaagatgggtgacgaattcacatacttgaggcatatcatccgtaaagtacgcgtcatggcttccctccaaatactgaaatggatcttgcaaccaaaccatatcaacatcgttgtacataacattgtaacctagctccaaaatttgcaagagatgttgtggccttcgagctgtgaagttgaagaaaccctagtcggatatgatgagtaaattagtgaaaatatatgttttcattacaaagaaacaggggatacataatcatttggatttgatcaagatccgaaagaaaaatgactgctactacatccacaggttgaccatcttttgttattttattagaggatcaaccatttgggaataatgtcccacatcggaaactgggcaaagatcttaaagtgtaccacatagaaaaggatatggaccaatccattcattgtcaattggttttgtgttggaacctcataatttaatactaaacacttctcaaaacaaaaatcttatagactactcaattttatgatcccagtaatcactcagagctaatcaagaacatccaagatctaagtatgatgaaggcgtggttaaggaatcccatgaccaaaatgtaatggtatctatagtaatatatgcaagtcacattagccaatctactcattgcgagtatataagccatttccagctagatctcagtaactgaaagctaaagatatctcaaaggggaaaagtttacctgggaaccgaaactgtatgcggttttagaatcgagcgctggaggaataagaacggcgtggccaggccacttttcgttgactttatacagagtaatgtaatcctcagcgatcacaaggactttttcttgatgcttctgtctagaaacactaatcaaccagttgttgagaaaaggcaagaatggtgagctcacggcgcagacgatcacagtgccgttcgtggcgacaaacttagctgcctgagcaagggtatagttacgccattcagatttggcatgcggagacaaagaagaagcataagaaggagaagagactttgttcggaaatagcaacaaaggagatccgggccaaggtaagaatacaccgaggagaaggaagagagcgagaaggacaaggaggagaccgttgcggctaaggagaaagatgggacggtttgagattgaagaataagaacgaggagaagaagagaatggtcgttgttggtgaagggtctgttgtttctgcgccattgttgtagcaacagagcaacaagatttgcagagagactttcacaagcttgaatcggattcaagatagagaaatatatattagaaaagtcaaagtttcttcgtagcactttaagtagcacacacgaaattaattaaacttgtataatacctagctatcgtgaacttcttcattactttacacttatgataatgaatcttaaataagacagaagttgccagtcctaatcaacttattaagatcacaacttgcacaattctttgacaaaaaaaaaaaagaacaacttgcacaatgaagccaattttgacgccaagtatattaaggtcaacttggagtattacttttcaatgattttaagatgagttaacacgcaagaaaaattcacgttatttcttaaaaaaaaaaaaaaattagaatgtggagtcaactcaacaaaattatgtttgcctaccgaaaattcaaaaattgtattggaactaaatttaaaattgattaataattttcatttgtgtcttttagttttaaacgatgagaatgagttttgttatttaaaagtttttaaagaaaaatggctactactactacaacatctacaatttgaccatctattgttatttgtaagatcaaccgtggatttactaaacacagctcaaaaccgaaaccttaaggtctacataaacttatgatccgagtcaacggtcagagctaatcaacgaacatccaaaatcgaagtttgttctaggatattgcttctagatggacaataaaatgaagaaggatattgcttccttttatatagatagattgctgctccagcttttatgaagcaatatccttcttcatttatgcacaatgtaacctaaatataccttatgaacagacaagaccgatagtagtgtgttcttcattttctaaggtgatgttttataatagaaaacgaaaggcataacacgtttgaaacagctagatcatatcgaactaaaactgcaagattcttagataaataatacattaaggaaatcaacttataatggtacaagaaatctaaaagagaaccccattccctagacatcttgctttcagatgcatagaatagagcaaaagtattcatctgaggttccaagtcttttcaagatgataggaaaaatgcaatgcaacttacacgagatgcaaaatggacgagatgtacttttattgagccccacctcaactgatttgcccgcactctctagcgtgcttcccggcatgagctctaaaaagctgcaaaatggacgagatacaatattgttgagcagcacctcagatgaattgctcgcactcttgagtgtgcttcccggcatgagccctgaaaagtctccaagcacacaacttgtatgtaaactagcacgttggtctttacacgtgtagaaccatatctctggatcggctttggcttcacaaatgtcacaccaacatataccactagccttttcaccatagcatagtgagagaggatgatcgtcaactctatgctttaccactggtggtagagtagcgcaattgaagcatattaaatgattacattcatattcaacgcacacgagcattccatatttgaacttgtaacaaccattgcagaatatttttccgtaaggtaaaatgcaatataagggatgatcgggatgacttggatggaaaaatggctcagaaattgaaccgcaccgaacatcgaatgatttatacccttgctggtacctgaaaccattggaccatctctcacaagcataacacttaaagacttcagtctcattagtaactagagtaagacgttcattgtgtagcacatgccatttcattctaagaaatccagcgcagttttggtggagaatgaagtcacaatccatacaaccgtagaaagattggagacagattggatgggtgcatgcgctgcaccgcttgttgtcatcacaaagaacactattaacgtggagtcttaggtaatgctctttgtggctgaaatgttgtattgtattgtcatctattaccacatatggctctatatcttctatttcttcgggtactccttcgagttcttttccgttccacacatcttctctagtagcacatagggaatgagcggcatagccaggacacctcggacaagaaaaacctccacaagtccaatccaccttctggcgacaaactccacataccgaattaacaacaccaagaacagaagttcgagagacgcggtgatcatgccgattaatgtttatgacacgaggaagatgaagacagacttgatggatcataaagtcacattgaacacatatgtaagggcttcggtcgccattcaaaccgcaagcactacataaaaaagaacggagacttgggagcagggtgagttggtggtcatgagctttcaaattccaaagatatcgttgtggtggatttaaaacacaagacatatccaaggtgaaattacacaaagaacaatgataaaacaatccaacttcaatttcttttgcgcatagacgacattttcggtcagaataattcggtagttgaccagtgtgaagcttaagagggtgcaaggagtggtaagagtggtttacctctaaagtgtgatttacctctggcggatgccatacgcaatctttgtggaagaataaatcgcattcataacatttgtatggaaacccattaatcattagtgccacacttagcatcacagtcaaactggatcagctccttgagaaggttgagcttgtggtgatgcgtcttggaaatgttaataacctctggtggtggatacttggcacagtatagatccatgtcgaagtcacagatctcacaacgatagaatagatccccgatgttctttccacataaatcacagtcatggctatttcctctagtacttagaagctgaagagtgtgattggggtgagatggatgctcgatatattcggaggactcgccacatttcttgtggacgaaaatatcacagattttgcagtaataaccatcacaaatagattcaaaacggccacagcaatcacctcttctcagatcattccaaggcatcatacgatgcttgtggatcaacggcattaacactccttcggaatccatggtcgtaaactacaagattttgaagaagaagaaaataggttgaatctaaaaaagtatatacttcaagatttggaagaagaaaaaggttggatctgaaatctcgggtttctttctctctcaaaagtcaaaagtcaaaagtcttctccgttgatctcaacgatgctcttataatatttcattaacaataatgatagtatgatactgacaagtgacaatatatatatcactaatcattattaaaatgaaccacttgtaacttgtaagaaatagtcaatttttttattctttagtgtgacaatcggcatgatccataatttttaattcttcacagcttgcagttaagatgaagcaagccatggaggaggagcattatggtcaactatatcatcagtctcttggacagaacaatgatatttcagtggttcctatggagacgtaccaacaagacgatgttctgtttatgacaatgaaccaaaccaaagagccaccacacttgactcataaagaaccgcagcaaccttgtgcatcagaattatggttatggaaacatggctgagaaccagaaccagttttgtagacaagagactgatccttcactctcggctcaagccatgggggagcatcagcggattggaacctctggtccatacttggattgattttgaaggtttagtagaagacacagatccctcacaacttccaatggagcttcaagaagaatacatattggatcatcaagatcaacacttctcaatggagcaacaacaaaacaagattattggacaagccacacatctctcttcacagcttccagttatgatgaatcaagccatagatgaacgacattgctgtcagccatatcatcaaaacaatgatctttcagtcgttcctatggagactcaacaacaacacaatgtggttggaaacttggcttctcaacaacaacttgaggaacaaaacaatgttccggtgatgactatgaatcaaaccacagaacagcagcaaccttgtgaaacagccactactcacaacgaattgtttcaagagatggatccagagattgctagtttattacttgtacaaaacacaacagaagaagatgctaagtttatggcttcattaggaaacttttagtttaaaattccattcgtttctttatgcgttcattagtagagtgttatgtcctactttttaattttaataaataaccacatttttgcatctcatgatgaacatatttatatatatactcggtataaagttgaacaagaggaggcaaaagtttaagcagatcttaaatatttctcagagactgagaacaaacaaccagaaagtaagtaacagagttaatgcacaacacccaaaaatacagtttttttttttttttttatcttggtgatgcttcacttccatcttgttttatcacagaacataaaacctgtcttgagatgtaactttccagctccctagagacttcagttagcttcaagtcaaagttagttctgtatttttgcttcggcgaaggcacagttgaagatgaagagcctgagaaccttcttcgtgggcttgagaatcttccaggtgaaacctgaagctttactgctgcagttgttgatggttgcaacacagtgttgttattgtcaggatctaacaaaagtccgaatttggtctctaatggaagtggcttaagtgaattttcttcagtcccggaaactggtttcgtcttcctcagtctttcctttgctttctcagctgcttgtagagccttttcactgcttaatgttatcagtttccatgggtttatgcttacatgaaaccccggtttcttgttgatcagcgtggaagaaggtgactgttcatctccttctatttttatggatagtctctgctgattctgttaaaacacaaaatataatctttgagagtccttaaaagtgacaacaatacaaggagaaatgagaagttgaatcacctcatttgctttcctgcacataaacttggagataaacgttggtcttaatctttcaggcgaatcaaaatctgagctttcatctgaagacgaatctaattcatcaaaagggtccacttctgtaaattgattctcctccttcatcgctaatatgtagtcatatgttctcatcccctgcaaatgtttgatactacttgtcaaataaagaactctaaatcaaattcattcacctgtaagagttacctttcttatgagaactacatggaagaggaaaagctgccccatggcggctgagccataagccgtgaacaagaccaagataatctgtaagaggacaaaacatcataaactcataaacaaaaagaagctacgtagatgtcatgaggaagcagcatatgtatatgaaactttacagatattgtagcaagagcccattgagggaactctacataaagccttctcttcaattccatttccattcctttcttgtccacaaaacatctgacaaatacggcaagagctgttccaccttctattattagctgttgcaacaaaagcaagtctatatcattgtttcaatgaacaagaacttttaaggtttacgtttcaagtagttgagagagcaacacacaccataagcaagacgaaaaccatcaggagtataaacgtcgtgtaattctttttcccaacgcagttattaagccactgaatacaccaaatacacacaaagattagcagtttcaaaaactcagaaactgtaagattcaggtggaaagaacccccaaaaccttaccctacaatggtgatcaaacccttcgacacaccggttacatgtcctgcaatgcttactgctgcgtttaacctaagcaaaacacacaaagaaacgtctaaataagtcctagcttttaaataaaagtgattgctaatgtaaatactagtgaagaaaagaaagcaaacctctaaatcacaaagtgaacaataagagatatcatcttcctctttaggatcaggtgtaacagaatcatcatctttcataacaagtggaaatggaagaagtggttctagctgcacactgcttttccatggatccagataagttcttctaagaaaattccttaagattttcctctctaatctcctgaaaaacctcacaacaacttgactcagaacaaccttgactctcagcttcatcaagacccctttggatttatcctttctctttttcttagcactagtcttatccgtgggatcaatcgcagtacacctaacgaataaaactataaccgaaaccgcctgaaacacaaaaaaaatcctcaataaactcagcacatggttcttcaagattctgttacaagaagagaagttaaacaaatgcaacttcttgagctttacttaccacagaggagaaaaccgaaagaagcgcgataacagctattcgattccccaagaaaaacccgaggaatacataaaaggctgccaccagaacactatatataacagctcccacaatctgcacaaagcagtaacacatcttaagttttagtaaccaaaatcaaaagaagaggaacaaaaagtcaagattttgaagtagtttttcccaattacgcagcttacactagctaatcaagaaactctagaaactaactacacctggaaacatatagatcagcacactgattcagctcatgaaacacataaatcgatagatcaacccaaaaattgagagattctccacacagaaacaaataccggaagatttgcaaataaagtaagaaacttttacaaataaatcttaaaaataagctgaagaagtgggttctgattttgaaacctgtaaagggtgtaatggtcgttgccagccatggcgtcttctcgtcattgtaacttgaaaaaactttgatttttcagatcttcaaggaagaagaaatctctgctaaatcaatcaatatcttcatgagtccatggtcactcctctcagctacggagatttacagagactggttttattcaaagggattaataattaataatgaaagtttgtgtttactttctgaatttatttttttccagttgttttgatttttatttttgtttgtattagaagaagagagagaccaacggtcgggttttcaaattttgaagtaacgctcggatctactttactctttggtgattcttgagctcttttaacgtgactaatttaaattggcccatttatgtttattgggcctaattcggcctcctttgcattttatgggccacgttttctattttagatgttaaaggttgaagtagttgtgttaaagtggcctcctttctcaagttttatttaacacattttacatatgtgacaattgtcactaggaaaatatacactggcagagccggttaaaccgacgatttggtatatatcagcgaccttgttgttctttagtttctttgtattttgttcatatacacaatatcgtgtacgctttgtaatcattggcaacaactatcaacaactaaattataaatatttagtaatcattgacagtaacttgtggtaggttatactcataccgatttagttgtggttgacaataacaaatttcactgattcatcgctaattaaaatttaaaatactaaaagaaatcagcttagttactacaattgtttcatatatatatatatatatatatatatatatatatatatatatatatatatatatatatatatataataattgagctaacaactacaaaatcgaacaatcattgttatggtctttgacaactgcgaaacgaacaataaatctaatacagtactgatccttgtcgttgttatatttgatacctctcatgatatcttattcagtagatataacaaaaaatgttactcatatagtcatattatatagttacattgtaatatattaatatatcatacaggcatgcatgttcttttttaacataatatatatttaagatgtatacatatacagagtatgattcataagaagtaggaaaaataaaacctacacccctcgttcttaacatagaagaaaaaaaaacgatagccaaaatcgtgtaaacctgtaaaaaaaaaacctataatagctctctctctctctcagtgatctccatatcattcatatataatgtacaccaaaaaaaaacttaagatacgcataatgtataatatgtgtgtgtaatatataataagataacatataataatggtagtaaaattagtttgtagagaaagtggtgcaagactgaggaagctgtggcgaatctccgttactactccctccactttttgcatcaaccttgttatcattaatatcagtattattattgttgtcgttattacctcctccgataatgtttgagatcgcggccgcaagtgccgccgtgaagttcggatccatcgcaatcgcagccctaactgaatcgaccatttcacgtggtggggcttgtgggccaaacaaattaggtattaataactgctggttattattattcatagacctaatttgattagcgtttggtaaaaacgcggcgggaccatactggcttagaaactgcggtggcggttgtagcggtcgaggtgggttggtgaggtctaaggttatggtggggaaaggagctgaggcagagagtgttgcgattgtggaggtgtatgggaagttatggtagaaggatgatgatgacgtggcggaggggctagagagtgtttggtggaggttgctggaggaggagcctgataagagcatggctgctgcggcggaggtggttgcagccatggctgtggctgacgggggaagaggatggttatggtttccttcgtacgttgttgtcaagatagttgtatcctccgcgcatcgttggacctatttacattcaaataaacattttaaatcattttgttacgtaaaacaataaagttttctttaagaataaatatgtcgcattctagttttggtttttcataagtaaaagattttgttagaaagggatttagtaaagcctttctaaatttagaattattttctatactcttcttaaaactttctaaatctgttgtatgaaggactttaataaggttttatggtattgctctaaatcaatacttctaaaggatacgtaatataatcggttatattagtgttgttattatgtcaatttttatattcaaagctacatgttgacgaaaagaaccaatactatatacgttaatcaatacaaaattctaataccaaatttttttttctataattatgataacattttctcatatatatagttatactaacctgtttacggacaggacatccaacggccatggtgcaacgataataagcgcgaggacatggattccctttcgccattttctgaccgtattttctccattgacatccgtcatttacctatattatatattaatattgattcaattttcataactcatatatatatgtaaggttaaacgaatcaaaaaaattagtaacttatagaaagttaccgtagtggcatcagatctagctctaacggaaaccctagcttttctatagggtaattgatcatgagggttttgttgttcttcatgattagtactcttgttttggtctattcgaggagtttttggtgatcctcggtgcatatcacgaccatccacgtcgtctggagaccgtcgtttcaaggtggtggccggagtttcatggttcatatcctttggtcttctgttctctagagcttgtgaggaaccagcttgaggtacatcctttttgccaaacaaaaatttgcaagaaagatgtgtcagttttataagaaaattgaaagaaaaagacgttgaaatttacccaaaatcataccgtagtatcggtaattaatttgatcaagtaacctcataatatatatagtaccgatagacccaaagacaagataataaatataaacacacacataataatagacatttgataacctaccacatatgcattcacatatggacgtattaaactattaaaattctaaggcaaagactcatatatgatgcatctacagattgtggacaaacaaaatatgatgcatatacaggaacatacctaactataaacaaataacttatcgtttgtagcttctgaaaacaaaaggttttttctagtttgaaatatcttagtccgaaatttgattttccatttaatattaagttatgaaacatttttttcttgaccaagtcattggctagctatttatttcatcttcttcatattttatcaaataaaagctgcacgtatttattcgtcttatgactttcaatctgggcatttaagatgaaaattatgaattcattacataactaaactacatccattatttacgcatattacacatagttttaaaattttaattgctttcgagaaaaacaaaactaatagatcactttaaattttcaaaaccagataaatcgaacactaaaacctaagctaatctcggtgccacataaaaaagacaaatatacaatttattttttaataaaccgaaatgttgatatatattttattatcatttttatgattttatcaagtacctcatgttgtttatgatgaagaccttccacttgtgtttgtcttgctaacaaaactcttctttggaggtcgttgtaactctcactgacctcatctaataaatgcttcagtttgtgattctcctcgtgaagcctctctagctccaacttcagtctactaatctgcaaattgtttaataatcataaccgtaactataaaagtataaatcaaacaattttttttttcattaaaaacaacctacagttttatatacggaactaaattaaagattacaaaaaagaaaagaattaaatatgtgtatatacataaatgaatatgcgcatttagataaactcacatgatcgggtaatcaagtgtgtgtgtgtgtccacacaacaaaaattaccatccgattattttgttgacaaatacaaatagttttttttttaagtaacaaatacaaatagtttgtatataagtgaattattcttaatacaaacactgaaattatgttaccacaggatactctgaaattctatcaaagagaaaaaataacaatttagaaatacttacttgagttttggttttgtcatcgccatcattgcttgatgttccatgacatgaatttaccaaacctaatccatcctattatgccatgaattttatgtaattaagttataacgtccaaacatatatttgtattcatatctataatttaaaaacttacattaaaaccagatgatccaacgatcgtcgttgttctcacatgaccaagatcaaacggctgacttttagcagcgaagaaatcaacttctttgatagacgactcgtgatgacgttccaccggagactcgttcggttgatgatcctttgagtcagaatctccgtggagaaattctcctgagtgtaagaacgcaatttcacggcgatcttgaatatgttcttccatttgcagacaaagagagatagatagagatagagagaagaaaaagaaaaaaaagagagtccctttatataaagactaaatttatgaggataagttgtgtaaagtcttagctaaaggtttccattttcaacgagaaatcactcttttgtcaaatgttacacatacaaataaatgaccaagcaactgttgggaatattatattagaaggttggtaatttccgaaattgcataatgatttagtttatactaattacgtaaattatgcgaaaatgccaattttatctaatcaattcttatgacatacataaaacgaaaatttacagcgttgcatttaaaatttatatttgatatttatattttatgtgctcaaacatttgatatatatgttgaaaattatttatgataagtatcagtctgactctttcttttgccttttaaaataggaagatcttgagtggttcttaaatgtcagatttgatctcaatattataagtatgtctttattgttattttgttttctttctaattttgtttagaactggtataaaatttggatacttgcagccagaatataattgagaaaatgccttgagatggataaattcctcgatatatagcgtcataaatgtacacgtgttaaataaccagggtaagatagaaaaaagtgacgtgtaaatcggcgataaatgtcgagcggaattaatttaattgttaacagtgacggatttccgttaagtggccgttagtaagaaagttgacggagaaagacgacgtgagtgagactcagtaaaagacgagcagcgttgtcctgaagtcaacggagttgacggcacggcataacggtggcactaaaggacggtgaagaaacgttaaagagagtgggacccacacaaggaagaatgggacccacatagggaagaaaaagaacctaatctctccaacttggaccattcattgaaaccggagctaactaccaaagtcttaaactcgtcatttattttgcctttttcttaaaaatttaaaatagttaataataatactatagttttttttttctaaactaataatcagaatttctgaatctgtcatcgtcaacaagctcagtgtagaccgtcgtgcaaggtcatttgaatatatttatatagatatcatgattttgggttagttatttgagattcagatttgatatctttaatgattcgttttataattataaacataaaatttatatacttgttcagtagtcagtactatatatacagagtcttagatttcacaatattagtttacatatatatatttataatgttattacgtgatttttccacattaaaaatgtatatctgattatgataacttttcaggttttatttggaaattaatatcatataaataattaatttcaaaagagaacttgtttgtttgttttgttaaatagcattttggattttgttttgtttaagatataaacctgagaagaataaggtcttgaatgttttgtagattttgtaagagtttttggattttgtttttcaaaaacttattttcataacaatcaagattttaaaattttggtttccctacaatttgaaaaactattttgttgtaattttccattcatgattttagttttttagtttttctaaaatttagggaatctagtttttactccatcaacgttatttttctcaaaaactaaaaactaattttttgaagtttttaaaacaaaaatatattaacaaaaatctaaaactaaaatctaaaatctagaaactaaaatcaaaatccaaaaactgaatcgaaaatcagcatccattcagggcctaaatcttttggttggaaattgacatataaatctctttagttagatcaacattttagctaaggatatattttaccagatttggaccatcctaaaggctactatatttattggcgctgaaatatttgctccttgattgtttattctggagaaaacttttttcttagagcattaatacaacaagactcactaaaaatacaataacttttggtaaaattaaatcgaggtcttataattataactgagatggttggttaattgtgtaaagtacgtagttgtagaagaatgttgttatttctttcgttccaaacatgaaacatgcataagttagtgaagtagagagggtcaaacgtgctatcggtgagatatgagatcgtatccatccagttcagagaaaggtgctagcaaaaaagaaacgtatctacaaaattatatgtcaaagaacataaaaagaaatttcatttgtttttcgggctattatcgaaaggacttcctctttgcttttcgcctttcacattttttttcttatttctttttatgttcttcgcttttcgtctttcaccttttgttcttgtttctttttctgctcttggtatttgtctcatgtttacttaggagagtatttagattgactttattagatcttcgcactaagagcctaattgtttaaaattttgttgatcaacgagaatgaggttcgaatggtttatgtttctatgttttttttacctttttttggcatgcaacttttttttaaagttatgtgtcatgtaataacttaaacttttcattttataatgatattttacattcttataaagaaaaaaaacatttgtttgatgaattcatttaaaattatttctgatagtatgcataaattctttttttgctgtttcacaataaatgttagttttaataattcgtttttattcttttttaaatatgttttgtatttcattcatatatttaaaagaaatttcaaatttatctttatcatgttaattttttagttataagataaaagtgtattaatacaaattttcaagccgtaatcatccttgatttggccaggaccacgtttcaaaatatatttgctcttaccaattgactgtgaaaaattcttaaacgaaatttagaatgaaacagaaggaaatttcaaaaaatttggttatcatcattgaaattcgtttagtagtagtagtagtatgtatgcataaaattgtccaaagatgaaggaatttgactgtttcgtattggttgggtattaaatcctaacaaaaaaaaaaaaaggaatttgattgtttcgtatatatacattcttcttaatcaacatcacatattatccaaaatcattatttattttgaaagatatactgtatattcttatacatgtatataatttacaaataattacatataaactgacttttgtctttttcgttacacgtttctactcgtcgaccagtctcttgtgatttgaaaatcaatttcttatgaggatgttaatttaaatgtcgacataatctatcaaaatatatgccaaataatttaatgaagatgtggaaagaactttggtcaatgatatagaagatgccatgtttccagttgacactgaaatctacagctggaaggtccttttccttagggttttatttaattgttatatatgaaaatatcgcacttagtactactattaaaattaagaaaacgagaaaccaaatttcataattcaaaaacttataatataagaggatatattaaattttgaaaattaaatacaatgtttattttgtaaaaacattacattcaagtttctaagtatcatccatctacatttcaactttcaagtcgtgatctttgcaattttcgtgtgagaagatttcatatcagcaagtcaatgataagtttaaatatattaaaaataataaatgcaatttggtttcgttcttgaagtgattaggagaaaaacatagtagtaaataattattaatatagtaatgaaaatagtaatttagtatcgctgtcaaaaaaaaaaaaattagtatcaaataccaattattatactatctttaagaaaaataaaaaacctacgttcttcttctacaatgagttattttttagaaaacataaaaatgataatttaaggtaaaacttgtgtttctaattttggagtttgtcattttgcttttcgtttttttctctctcaatgccttgctcgagcataacactcttcatcatgagtaagaaacttagaatgtcttcacagaccagacaagctagctgcaagagtttggcggaatgacacatctataactactaccttctctttctttgacatatagaagtaactattatccgcaaaacttgaaagaatcacatatatgccgaagaactagaccgcttttgaatttggactgaaaaaattataagttgattattgaatactttcaaccataaacaaaaactaaaattgggaatggggaagatatcaagtaaacgaaaacggcgcttaggtaaagcccaaaacaagcaaataaagaagagtataaaaagtctacaaattagtcccacactttgcccacacgtttgggaggaaaaataaataaagaggccaaataatggtccattttttttcctcattttagttatttatttatattattcttccaatgtataacgtacaaaatacgttactcatatatttgtgtaatataaatcaaacaagaggatttaatcatgcaaaacggtcctcggctattttctcgtagttgttaattaactatagtgagggatcgtggaattctagctcgatgtattaattaagtttgacctatagctacttatatttactctcttcacatgcatatatatatagtattgttttaagaaaatagataatcttaagtactcctatactttatacagctttggatcatgaacctacaagtaatttataagttcttgcatcatttagttaaagtagtgtagcgaattttctattcatttgtttaagaattaaaaaaattgtgagagaatatggattggatttttgaagtatatatgtatatttttactacatacttttgtatttattttgaaaataatgcagaagcgacgaggtccaaaattaaatgggaccagcatgtagggggtttagccatcaaattgccaatctttttcgtagtgactttgaaaatggagcgacctctttaaattcatatccacaattcattcaaagattcacactcactcccgaattagttttttttggggttattttgtagatatatttttaagaaatcattcgttgattatgcacatcacgacgtatgtgtactcaaccacgcgcgtaaataaatatgtgagaattaggttattataacttagtcagttagttatattaatatcgcaagagttgttttttgataaaattcggaaaaagctccacatgtactaagattatgaagtgagtcgagaacatacaactaaagtaaatagattaatgtaaaactaactaaaccaaaaaaaaaaaaaaactcatatatacataaataacatatttaacttttggtcgctttaattaaaaatatattatttctctaattactcacaaagtgttctttgttgaggttcatgatgtttcttcttttgtttaagaaaagttaacagaacaaactttcaacaacatgtgtataaatacaatttgtaattatatttatggcactgtatatctgttacagtagagatgtatacacgttcgtataaagataaacgtatttgttgtaaatcaaaattattttggtttcaacttgtgtttgctcctaattgtgagtctttacttcagttttgagttttgaatggctaattttgttgagtttataaattttgtactaattcgttatagtaaatgttattagataaagcaaatcaaagtttgcttcctcctaacacgatttgaacgttttcaaattgcgatcagccaaatattatatatgaattatgatatgagagaaagtatatttttaagacatcatatgggagaattttgttttttgttctttctttttgtggacaactgggagaatatagatatatattatagttagcttgtctgctcaaatatataattaactaaataatccaccgatatgcacgtctaatgaaagatgataatatatataaatatatataaacatgtttgtatgtgtgcatttttgtccacatggtctaacaaaagtcaaaggaatgaccatctaattgtcattgatatgttaggtttaatcatattttacggaaaatacctctttggttcttaatactcttcttttcggtccttcctctctaaaaccaaacttaaagagacaatactcaatgttttatatgaaaaactaaaaaagaaaatcaaacttagatgcacctacatggatcttcatttataattagttcataaatgcacatgtgccacatgtgccgttcgaactgcacgattcggtattcggttcggttttgattcgattatagtctagttctgattatttcggtgttctcgagttaaagaaccatataaaaatcaaaacaattttggtttagttcggatttggtttcggttctttcaattcagaaatttagtatttattcagatatttttgaatattttagatatttttatatatttgcggatattttcaaatattttttggattttttggtattcaaaaaaacatacagtataaaaatattttgaaacttgaacttaaattgttttagctagagtatgcccaaaaaaaaaaaaaaggcaagaacataaaaggatataagaggtagcatatttatctcgacgctatatgttctacttccagatttaataattttcaaaaccatgacaattaggatttggtgagtgagaacgaaaaccaattactgactaattgaacaagttttctcacccaataaaacaaatacaaaagatatagtgaatatatagcttattaggtttaggattattttttttgggttaaaaattagggttacgaattgggttgaattttttaaaaacgtaacgtttgtgatcagtggtcgctcaaatatatatatatatatatatatatatatatatatatatatttatatttatattttatttttttgtcactcaaaattgcttccacgtaaatctgtaaaaaaagaagaagaagggaattcgctctcccatgcactaatacttggtaagttattgaattcacatcagactccatataatccattttatctccgaaaacatctgagtacataaacaataatttaaacgtttatcacaaaaacacttatctatttctttctaaagacatcattttttttattggtaattttgaattttagagaaaacaatttgtaattagctgacaatttttttatattgttatatatcttaatatttttgaaatatcaaaagaggatcatcagatttattgaaaataggttttcaagagttcatctggaactaccggatgctataaataataaataaaaattgttgtatttggaaattttttcatgtgaaagcaactactatttctgggattcccttttgttactactactactcaattactcatttaatttgatcaaaaagactgtaaaagtaaaaacttaattgcttttgtcttttataaggaaacgttgatcaagctgatgctttggcaaaagctgctcttgtttcttcttgtactaacgttgataaaaaaaaaaaaaaaaaaaaaaaagatctaaacttttatttaacgctatttgacatttgaattcaacctggtttattacaatcctataaaattttaaaaatctaaagagtaaaattgtttaaatcaatgactaactatgtgaacatttactcttgtatgacgagtgcatttacattgaaagtttagaaatgaatttagtttcaatgggctgagttcgatattgggccttcgagttatgaacattcagtgaatcaggaatggttgtattcaacttgtgatttgtaatttttttctcaaatcctttgttattgaaattggaatttatataaaatcactcaaaagaatctataatcttctgttattcattcaagaatttataaaacacatcttaaatccactgttatctaaactcaacaaaacaatttcattaaaaacatttaacattgattctgggagacttaggcaaaaaaatttagttgaaaataagcatgaaaaaatctcacctgtaggtgttattctgaacgatttgatttaaaaaaagattcacagaaaatctctgcgacatattctcattgtcctcctcccctcgtcttccatgaaaaaagctttcggtctctgttcttcaccggcaaaatcgagaatggatttggtctgtagaagaatgcaaattccaccaaatcttctaaaagattctggtttcaatacacccccctaaaattacttaatcacaacttggtcttcgtatttatgattcagctgatccgggaattatgttacacatgagctctaggaatgacttgtgttatcatttatcaagcaactgtttggtaatgaaaatacaagtctaaaactgataaatgtgagacatggttcctcaaggagaatatgcacattggaaacatcaaggcatcaagtaataatacataagagggaatgatggatcaaacggtgttgatggtatcagtaagacatcggagaatgcaaccgagaccagctctctcagtgagtttctcgtgaatcttcaggcactgatcgcaggtgggtcggtccccagtagaaagtcctctgtacaagtacctgagaattttaagcaaaaacattctatcaaagagcacagacagcctgaggatagagctttccaattcatacatattacaaaacgcattacagcaaaaaaaaaaaaaaccaactttgcacttacttcatgagaatgtcgtaatattcgacatcaagagcattgagcattccgtcaatatccttaatggccattaaagctctgtgcacaactatccaattagccgactgcagttgagttttttttggctcagtaaatcaaaaaaaaaaaaaaagatggtttcggaaagagagagaccttgcaacgttcatcgcgagttttcggaggcgaaccttcaagagccgttttcaaagcttctacatgtttgtacctgcacacattaaaacaccgataagggattaaaccaaaaacaaaagaagactttagggtttagctccaaggtctgatattactgtttgagtaggctttcaatcttcctcgatttggtttcgatcctcgcgattattgcttctgcgttatcagcttcaacgaattctgccattcttcgattcgatctttctctccgatcagagatttcccctctttcccttctttaattgaaaaaatgagagagagagaggaaaacaactcaatcgccatttgaccatttcaaaagggaactgagtgccgtttgtcttggccttaaacggcacgtagtcttaaatgcttatgctgccactgaatgatggatgatggaagcttcattttttttttcattttttgtcaataggattttcatcgataggattcaagttgaaatacaagagccggcaagtacaaaccacttccggagacataagccgatgagtacaagaacactcccgaagccaaataccaaacaaggtaaacaaagggaacaaaatccaaacaaaccaattacactatattcattgaaatttcctcgatcaggttctagaaatccaaaaaagacttacaaatcctaagtcatagaaaattaaaacaaatctgagactaaaaaagacacacaaacgggttacaatacaagaatctccttttctttcttggtataacaattttttttttattataaatctctcttataaatttttaatagtaatatttgttggaccgaattttttatatttatactaatgaacttttctttacgattttgttaccattttggtatcatttttacgattttaatttattaacctccttaattaaaatcgcaacctattctattttattaacacaggtcaaaatatatttttttctgcgctcgaccctaatatgttaacaaaatggttgtttctgcccaaatctcattatatttgtatggatagacgaagagcattttgataatactcttttggaatgtttctttatcattctaattaggatcctacatcgaaagtatactataaatggagtaaacacactcatgactgctaagtgctaacactagtatatatggaacacaaccaatccaatcattacccattggttttaaattagaatctgatgaaacttaacattaactttctctaatcattaatgatattggtagtcttataacaaatatattgccaagattcggtctaagaccacttgatagaactatgtataaaacttcttttttttaactgccaaacctatataaagtggacgtgtaaactaaagcatggtgatcacttcacatcgcaccaatgtagtggatctaaacgtctctttgtgtaatcacgtggtcgaattaatggtcaatcatttagcaattaaccaaatttgaaataacatccgaaaaaagtcggtttagtgggaggagaagtgagaatgatgtttcatgaatgctcgttaggaactcttcgaaagacgataacctcggatggatgtttatggtgtcggcttctagtggttaaacataattagatcgtctactgaaaagttggagatgtggttgagaaactcgtaccctacatatggttactcgtctgctggtttaatcgttgggattgatcgtgtactagtctttcttaaaggccaagaattttgtcgtcgtagttaatatatgttggcgtacgttttactgtttttcttgagaaataattggatcttaagcttattaaaaaagtcgtcacgacttggtccaactcgtacatatcacaagttgctcggcgcttttcatgttagttagccaccgacctcgaactttgaaattttatattttttaacttcaaaaacaattctttgatagttttgttttcattgctaatatttctctcaatttttttttattgtttttatttttgtatagaatagtattcaaaatgaaactataattcagtatggaacactttctgttttatttaatatttacttcataatgaattatgtttcaaattttcaaagaatatatttatatttgaatttggttagtaccttccaaagaagcttaattccccacattaaaattcaacttggtcttcatattaacattattcaattgaattcagactgaaatggttcactttatctggtttgaaatatatgtcatgcattttccaaatcaagaatgaatcttcttgaaagaaaaaaaatgagaaaaaagaagaaggagaggaatgggtctcctaacaatgaaaaagagaataaacccttaaataattgcaactatataaaataaaaagtataaactccactaaaaaaagtcaaaacgtagaccaaaacaaaaacatgtaactaagtcgtccactactacatctctatgactctatataacaacaaagccaaaaccacatcttctcacacaaaacacaaaaaagaacaaatatggagaaacaaatctctctattgctctgtctactcctcttcatcttctcaatatcatcctctctccatgaaaccgaagctcgaaaacacaataaatataaacccgcaccgatcatgagcctagtcccaagaactctctacgaccaaatcttcatccacaaggacaacaacgcatgccctgcaaaaggtttctacccctatgaagctttcgtggaggctacaagatccttcccgaagttcgggagcgtaggaaacttttggacaaggcgacgcgaagtggctgcgtttttggcgcagatatctcacgagacaacaggtggttgggccacggcaccagacggaccatatgcgtggggattgtgttttaaagaggaagtgagtccacagagtaattattgtgatgcttctaataaggattggccttgtgtttctggcaagtcttacaaaggaagaggtcccattcaactatcttggtaagtctacaaaattaattattaaccaataaccatttatatctatttatttgctcgaacaactaggtctacaatagttcaatgccccatgaaaacattatatacttctaccattttgcgaattaccaacgaaacttcttttgaatggttgtatcatctttgctacaagtttcatatccatatatcagtcttaccttttggttaacgttactttcttttttgggatatataggaattacaattacggacaggcgggtcgagcattgggtttcgacggtttacagaacccagaacttgtagccaacaactccgttttagctttcaagacagctctttggttttggatgaccgaacagactcctaaaccgtcctgccataacgttatggtcaaccgatacagaccgacgaaagcagatagagcagcaaaccggactgtcggttatggtttagtcaccaacatcataaacggcggtttagaatgtgggattccaggagatggacgggtcactgaccgggtcgggtatttccaaagatacgctcagttgtttaaagtcaccacaggacctaatttagactgcgagaaccaaagacccttctcctaaatataactataactcaaatctatgtatcaaaatgaaattgaagtttgatatctcaaaatatttaataaaactcacgcaagctgggagatttaatgttttacatttacttgtaagcgtaccgtgacatgaagttgttgacctcaatcgcggtttcatatgcgccttctacacaccggcctaaggctacaccagcgacgtaattgccacccaaaaatagcccttcgtagcccgaagacgttagagatgatttagccgtgtcaaggatatcaaagtgaccaactagaaactgaggaatggcttgaggccataccctaactcctaatttaagtggatcggtcgaattaggcttaattagcattttcctcaaatctctgtcaactgcttccactaactcaccttcagactgcggaatcaaaacaaaagagagagagagaagaaaactatcagttcttaggtttacttggttgaataaagatgtgttacaagtgtttgctgttttttaccttggacagaattccggtgtttgtagacccgccaatgtagttcaacagcaaaattcttccgggcggtgcgcgatttggaaagagtgaggagctgtagatagttcctgaagaaatacgagcaacagcatgaagattctatgaacattttgacataattgacgattataactacaagatatatacctaatgtttcaactccttgcgtgcgtggatgcaattgcccaaaaccctttagttcaccatctatcaaacattctgttcggattgcttctttcgggtacgagatagatactgctgcaactggtgggtaatatagttttgagagtgcatttgcagcagattcctgagaagataacagttgcagcacacgatttaagaacccatatttgtcgaatctatgaattttgagcaaattcctagttcgcaaaatgagaaacttacagaaagagggcgcaagagaccacttgcaacatgagatggcaccgtcattacaacacttttgctctgcacggaaactaaaccatctggagtctcatatgttaagttgtatcctccgctctccagcttagtgatacctgagagcttccaagacaacttaactttgctacctaatctgtcaaagtgcaaaagatttcagaaaacatttgaaagtttttcccttttcccttccaacaatagagagagacaagtactggataccttgcagatattgcttctggcaacattcgaagtcccttcctgaaagaaccaactgtttggccctgtggttttggcaggcgcctgaagaagcaggttgagttgttttacaaatatatatatgaagggacaaaagacccaagcaacagaaaagtttgatgttactcacgggtctcgttctgccttgggagcgtttttcctctcctgaattgccttaaaagtaccacctattatgcttccaccattttgctctagtttccaaaccttcccaaacgctgctttcatgctcagttttgaaggatcaccagcataaacacctaaaagcataaaatctaaagcattaagggtgcactagaacaaaaatgaaaactgctagataatcagattcgctgacatctaaatgaataaatggttcacatgaagttttatctataactctacctgaacaaaacggttcaatcaggcgctcaaaaacctcatcaccgaggttacgccgtacaaactcctccacagattcttcacgaccctgtcacctttgccaaactctaagaacatgagcagattctaccaacataaagccctaaaaatcatattgatctaaaaggtcgtaagaatacacactggaggtgacggtcgaatgccaagtgcaccaaaaccagctctaatcttcccaccaatactcatcaaatcaaagaacggtaagtctgttagcttcgatggaaccggcctcaatttcccattccacaacacaaaccttggcgcagtaggatctcccaacaccaaatcatccttcaaaccactatctacctactctaaccataaacagagaaggctaaatccacaaatcaaacaattcacaaatacattgttctcagtattaacgaatcagattgtttcaagaacttaccaccatagtgagcataggatcagacggttgaaaactattgggaccttcttcccagagaaaaccattctcttcacgagtgataatgttgcctccaacacgatccttagcctcggtcacaattaaattcggagcagcatcaggatgcttagtagcaagcgcctgagcgatgcaaagaccactaatacctccgccgacaatcacacaatccgtcgtgatggtggtgcctcctccgccttcgatttttgaagatccgacggttggtccaccggccactgaacaacggagtctaagaggcttataaacatttaatcggagattgggcttcgaaaacgacggaagaagcgattgagtcgtcggacggagaagagataactccatggaaatcgcagagaattcggaattttgtcagcttcttggtttttttcagattgggtaatcttcttcagaagaaaggagaagacgacgagaaatattcacctgcaatcacacacaccataagtctgtgtaccgtaccgtatactttttctttggtttgggtttagagttgggtttgacccaaatataaaaaggaccattacgtttattttattattttagttaggcccaaatttgttataacatggttataggcccaatagatatataaccaaacctttttttttttttgtcatatataaccaaaccttgaaacccattatttttgctttgctttatcaagttcaatacgtgtttatcataatgaccctttatttggaattagtgttttatttgcgaattaacattttagtatattaatttggtaatattagtgaccaaattttgatgtaaatattaattaattacatgagaatcgagtttgaagtcaaagtccattattaccaaactttattaaacctctttaataaaaggcaacatgcttattcaaatttatgataattatataattcgatcgatatattaattatgaccacttggttaatcaaagcgacgtcattagagtaaacaccacataattaaataaagacaggactagtgcatgtgtttatgctgtccctaatttactcaaggccctaaagattgtgtctttgtctcgcgtcgttgtccacttatctttctaattaaattttcaacaacaacaaaaaaaaacaatttaagaaaaaaatatttgatggcgatatcaataactagatttattttcctgatataaattatggaggtttttagagataaacgggtgtgatttaagcaatatatgtatgctcaaaatgatttatgttaatctttcaaatcaaattggttgtcaattgtcatcccctacatcatcaaaaaggaaattaataattaaaataaactcaacttttaatttagatttcaaagacataatgagattacgtttttaattgccctttttcttgatacttcgaaattcgattgagaataatttgtgacgttaaatgaatttttgttactttgtgtcgtgttcacttgtatcccatcaaacatctattcctagttagagtgaaataaatggatccgttcataattatgcacaaaaccttcatcataagaaaaattctttgtcgacgacgaattctaaaattttaattaatcattgttttaggcaatgatgattaccacttatacattactagtgtgaaattctgacgtgcttctatcaaaaaaatttaactacattgattaaaagaagattatatttgaaacatttatgtcaaacaaataaagtataatttcaagggaaatttttttgttttacgccaaagtactttagagtcgacttctttctaaagaactaccacagtgtttatctcgagtttagaatgttttctgactaatgtcaagggtagtcaggtcacttacatttctgactaccaggtaaatcaattgggccaaaacccaactgacagactttctaaacaaatataatttttgtttctaaagaagatcaaactcggatccggaaaaagaaaaattttaatcgtacttcaaacttcgaatcatctttttcgcttcacttttttctgttaaaacaaataatcgtatcgcaattattctcctcacaaagggaaagaaaacataataagaaaaacaaaaaaatattaatatataaaaatagaagaaacatgcatctagggaaagacatgaatggaacatacagtatcaaacaagaaacttcactgccacttgccagcaaataccacgtacgcatgaacccaaccgtgtggacagcgatgcaccgcgattaaattaatacacacttccgggatcaagtaaggtcgtcgtcattaatacacatttcatataaaatactccacattacattaatttccctaataataatttgtccaaatattaaatggattttcattggacagtttacagctaacaacattgatatacatacgacatcaaaatatcaaataaatgttgatatgatactcgattatataaaacattcatgaatttgaataattaagatgcgtttgtgaactgtttattttcggtgtatgatattagtaaacgtgattgaaaaaatcgtacgtttcgtagtcgaaatgacaagacaggttggaaaataaaaattacaaagaccaatcaaataatgttttttaaaatgtcaccgtctggagaccatgaccatttgtacacaaaaaaaaaaaaaatttggacgtgtgcattgatacgtatcttgtcgtagactcagccctgatccctaagtacttgcaataatatacgacattaattattttcacaatatacagccaccgacgtacagataggcatactctctttatttctttaatttttgtagatttcttgaaagactttctataaataaatagataaacatatctgtatatttatgtaactaaatcataaactcacatagtcacatttggtatattagtcaatagtcatccaatgaagcaccgttttatgctctatatagtaacaatgtcaattaatcagcggttttgaatgcaaacatgttagaattagcgacagtaaatatatcaaaactagaactgacaacataaatagtttacagctatacaaattatattgtaacaatattacaatcagtggctaatgacgatagttattttgtagatgctaatgtcgtttaaaaaaaactagtatagatcatttgtttgcacaaaaaaaaaattaagatcatttgcaatacaatataataataaatcatattctgcaaaatagtttgcatgttataacgattcacaagctccgaagtgctttggatgcgttcagttatatccaaaacacaaataataactatgtttaaatatatatgtatatatatatatacatatatatattattttctgcaagtcgagtaaaaaaaactaaataattattggtccaaaaccaaatcaggtgccgaaagatcgatagaccgatccacaagaatctgtcacataaatgccgaacgtgggtacgtacggtcggaaaaagacgtaggatcccaatttagctggctgttatcgggataaatcaagctcgtcaacaagtacgattacaaaaatgtaaaaaagaaagaaaaaaaaaaaaaaagagttaaacaaacatatcggtgttactactagtcatacttgttttagtcattgaaaccgttacgacagaatcttccggcatgagtaattttgttcttggacctaccaaattcttacactttacacaaataactgtaaaaaagaaaaacaatgtttaccaaccactttttcttcaatgtcaccatatttaaaagaacacgtacgtaagtaaaatattggacaataaagctaattaatgcccataactatttcaaatatggacagttttataagttaaatattatctcaaaattaccaagaaaatagataaacaaaattattggtacaaaaacttaaagttagatgaacaagtaagaaatgtagtagaatgaataaaactattaatggaaaatatatgaatcaaatgatgtgttctcttttataacagtaactttgtcgagctaacagtgacagtatttacctagcactctcatctcaacttgtttatctaacgacaaatagtgttatagaatatgaggaaataatttagcataacgcatattatttgctccactctaataaaaatcacaaaccaaaatatacgtactgttctgttagtggtttatctatattaaataattagaatataactgtagaattaaaatgtttttatttttatcttcttaaaaaatttaataatatattaatgttaaggatgctcttagacttttagaccaactccattcctcatcatattaagagtaatcccaatgatttaaaaccaattgattcttaattttgaatcttaaccttattttaaatgaaaatgttgtttttactaagttaagaaaaattaggaaaaatcttaactaatttctactcgaatggttaagaactattagattcttaaaaaacaacaattcaaactatttcaaaacaatgtctacccactcaaaacacaacacatatactcttcttagttttaagaattaattaagatgtttatcttagctaaggtttgttggttttattaaatttaatcacttttatacctaagaattagctaagatacaaggttggggttgctctaaggagtcttcccatgataaaaatatttaatgtttggtgtctttaaatttaagacatcatatcttaaatgttttggggaagacattttgaaaagaggtgtctccaatttaaataacctcatatttaattattagtattttgtaattacagttttttaatattatttaaatactctccttgtatgtgcattgtgcaatggagatactttagtatatgtatttttattttatttttgtaaactgacccttagtatatagtatatacatgtgactattgacaattagaaccatacattctctgacagatatatataagtggaaactcatgaattttccatgggccatatatgagccaaaaatagattaataatatatagagttgatttgacattttgactttttatagtttatttatatggcatctatttttagctgtacaaaagaaagtaaatatgatatgaagcctaataatgtgaaagggaaaggaaagaaaagttactagtcaaggaagttttgatctttgatgtatgttaatttttgccggttgttattagaattttcaatggcagacaaatatagtaatcaatttctaaaagagaaaaaatcatgactaacgataattataaaagtgattagtacccctttagcatcactaattcatcaaacttggggtttgccgacaattaccactagtcaactacgtcatgataactatttcgcagaataatttgaaatttagaatttggatacaatttgaccagcaacccaaaaataacataaaatttagttcacttaacaaattttgttttgaacaatacgaaattgtgtttattagttgatattgcataagagaataattgaaattcgatagaaattaatatataattagctcataagcaaatatttcaatcggcaaatcattattttttgagctaaatatatgtgttttgttcccacaatttacgaatagtttaatttagtttcaaagtcgtaatgttaataatgttgctttgaaatatttatgttttgaaaatagtttcgtaagaaattttttattttcaaaatttatcgtttttttaatcaaactatcatttaatatatcaatttaaagaaacatactattttagaaatattcattttcaaaattaatcaaacactaaaaatactttctccgtttcataatgtatattattttagttacaaacaaacagattaaaaatatttattttaaaaaaaaatcaatcattcataaaagagactacataatataaataaacataaaatagtaaattaatatataatttgcataaaaacttaaaaataagttatattgtaaaacattttttttatcaaaaacaactgtataaaaaactagaaaaagtataaaataattttcaaaattccttacttttaacaaggatatggtaataacagtgaaagtaaaatagcttttcgttaatattgatgtttttctttcttgtgtttctcgaaggaacaacgttgggattcgaattagatagtgaatgataatgatgatgatgcataatgatttcatggttagtacatccttaatcactatatgcatcgcatggcccgcgattctcctcttgttttcatcatcagcttcgctttatttacttggcccattcctacagatcctacacgtgtcgactctctaatgatccattatcatcctctaatatttcccaaattttcatttgaattagtttacacattaatttataactaaattagtagtgttctaaagaagacattctagttaacacagaggctttaaagtcaatagaaaaatcataaacacttaataacgtagtacttgtgagagttagaccctttagttttaacctaacaatttgttttgacataattggttaaatttatgacgagttctaggtggtcatgcgaagccatttattggtatataatcagattggtttaatatacaggtgattgaatttatagttgtattcttaacaattattgagaaaaaaaaactcaccaaaattttatttatgacctaatagttcattcaacttatacactccatacaatgcaatttgtcaataccaaattctttattggatatcgttggtaaactatacacatcaaaacattcttcaacgttgctcgtgatttagataattaggtcgttgtccaaattttgaaccctattttcagtatctcttatttattcatattctaaaacgtaattattctgtgtgtgaactaggcattatgctatattttttaacaagtaaatagtattcggaaaagttatgagctatcattgttatccctttttaagggtacatctttatacccatatttgacaccaacgaaatgaaatatgttatatctaaagctcgatacgaaatggcgatctaaacaaaaagagtttccagtttattaattgctcaacgatccttttctaaagatatatggttccaaaatcttaactcactcattttatttgatacctctacctgtcattcatgtttggatcccacatcgaaaatgtgatcaaaccaaaaattgtgattaaaccaacagtatataaagggtatgaattactccactcaaaagtaacatattacctacacagactagtaaacgtagtacctacggagtctagtaaacaaacatatagtcatataaccgatccaaaataaaattagaactggtccaacataaattagtcaaaagaataatcatctaaagatattatgttaggatcttacatcgaaaacacgaagaaactaactaaatttagttttagttattcttttagctgaaaacttatgatttctggctaatcgttattcaaataaatttagcttattttctcctttttcttatgaactaaacttattttctcctttaaccgcaaataaatatgttatgtcgctaaaataaacaaatagatattttgttttataatcactaaacaaaatatgttttcctcgaaaacattttacataattttacgtttcaaaattgtttttgcatgaaagcactaaatatgagatatcaactgagtcgagaaagtgaatctcgtcggggacatgcactagatggaaaacattttgaaagaaccaaaaagaagatgacaaatcttcttctttttttctatcgcacacgcatatagttgtttatggatatcacgtataagacatttcttttttggcacgacatttgaatactattataaagagtagtattattggagcctcgaccctctatgcgtggggtccttataagaagtcttttataaccattaaccttttataggatagcttcctcaaatatttgacttgtaaattgtatcttgtctaaaaataaattatttttaatatatacaacgctagccaccatatggatgaaagaaaaagtaccttcataattcatattactaaatttttaatataaagtgtttgcaaatattggaaaaaaatatggttcatatatctaaagaataatataacacatgaagaaaaaaatacccatcacgacctctccaaattgcctttattgtataattatgtgacgctgtctgtatatgaacgtacgtgtggatagttaccctacatgtctttgaacaattgttatcagtatacatatctatacattattgaaattcatatatttacattgtagtatcctattaaattttgattggaacaatatatttgacaaagagtttggccatttcatgtacttaattacttattgatggaattagatttataagaccaaagataaaaaaataaataaaaaatatatgaaatggatgttcggataaatctttcaatttccagctaaaacagtacatgtacctacttatatatagatgcatctgaaagtacatgtttcgcatatccttttgattttgatcgattagtctgatttccgctttactatatagtcttcttcatagttagtaatagtagaccatgatcacataaattttactctatatttatgagctaggttagagtaagaatattcaataattaaaacttaatataacaagccacagacgtgtaatataaataattttgattaaatcgttcgcaaatatttttaacacatctatatatatatatatatatatatatatatataatgcaataatttgtttttttaataactattttcaagttcaagtttaagtataaaattttaacattaaatacatttccaaaggtaaaattattaaaataaaagtttattgttattatattgttaaattttagtggataattgattaatcaattcgccaaagagacaatagttgactggagaggaaacatatcatgtgcttgcattatgataagctaaagagtaaatgatgatcccaaaaggattttattcccgattataaatattgaattcatttgttaattaattcattcattaatttttccataatctcatctccattttcgtaccagacaaattgctaagggtttaactagcatataaatatcatgggaatctctatattttttccattaactaatgcatgcgacttattagggtgccaaaaaaaagagaggaatacttgaagattaacccaaaataataagaataaaaaaagacgtaagataaattaatatgtttttggacaaattttcggaatgcactagactagtaaatttgttcgccgcagagaactcggttgtgctctattgccggtgagaatagagtaaccaactcgaccattaagtctgttgtgctcgatttaatttctttgattttcttttgacccaatgtgatcaaaatgatcctttgcaagataaaaaaggatttgtcaaccctaaaacttatcaagctcaagtcataaatggatagtggttgtttgaagactagagtcgacttttatggaaagacaaatagtatttagcttggtcaaagaagtatttaaaccctaacttagtgtttagtggatttagacgtgtgtcattctccataaccatactccattttaatgatataattggtgtataatttggctgaaaatactttttattttcactttttctctttacaaatggaaattaacttattttttcactactacttattttttcagaaataaattacaaatggaacttaacttactttttcactattcaagtgtattttctattaatttttccaaacgaaagaactccctatgacgttttgctctctctaaacttttttcaaaaatttctctcatgagtagttttaaaatcgaaatagatcataataaaacagaagaaaaacaccagaaagccaaaacaaaaattatgcaaccagcctcgtcaaaacactgaagactcccgtgcaatacgctcttgaagccatgatagacatcctaacgccacatatgaagtaaagcgtatttcctttgtcacactataagcaatatctgtagcgaaagaatggctttcggtgaaaagagataaaaacttaactcgttcatcacatgtactacttgcaagattttatccagctttcagtgaagagagatggaaacttacttcacacatcacctcaaaatttctctattgaattattttatatggaggaacatttagtacaaatttaaaaaccaatagacactcaataacttcccataaagaaatcggtttggtatattactaaattatggacgttagaccgattcttatactgagcagtcatactaaattaaaattttagattggtttatattcattttttctaaaaagtgaatgaaaatcacattcagtactattaacaaaaaaatgtaaacaataatttacaaaatagaagcctacacgtgtagtctttaacttgggtttgagacagaaaaaggacctacaaggatgagtcgagatacgttatccaccaaagtcacagtgtatcacatgcctttgcctctgtccttctccgtttctccattcggctccacaattttcccattccctgatttgcgtctatggaaattactctacactaatgctgtttcctaccgttggatctataagctgagccgttagatctaactatttcttgtcaacatcagttgactgtaaaaactagactcaatgtgggcttgaaacatgctcttcatgtgataaatgtcctgattcctaaagagttttgtttctaatccatgtaaaaaatatacagtaatagtaataatattgcaaaacatatacaattgttgaaaaataccatgaataattcgtattattcttgttattgtaattataatggtacgtcgataattgatgttacattttatcgaagccgtctccaagacttggcttatattccatgaagattcctctctttttttttttttatgttgaaggccatggtttagactttagacaccgaatcttcttttattttactttttttttaatgataatggacaaaatattttaatataaaactttaaactaaacaaataagttgacatcaattcttcatattaatctagttattgacaatgtatgtctcttggtattttgaaacttgagagtcttccatctttactattttaaaattttagccggagtagtttgtacatgtaatggttttacaaaacatgatcaataactttataaaacaagcgtaatacggcgttcaaatttggtttctgcatgaaataaaataagtagattaaatagtgtttgaataaaataatactaatcttagttaactaagttttatacgacagttattcgtttgagtatgatatcataaaacaatgatatatttactcattttagatgttctaggtgtagtagttaattattgcaagtcaagtaatataaaagttaaagagagcaaaggtactaatagtatatgtttatgcacataagttgattaaatatatgtataaccaataatggctcggaatcattgtgtgttttatgcctggcacaatattatattggttcagacttagttaaacactcttttagaagtgattaaatattcagttgaatgaatataaaattgaattcttatgttttgttaactttaatcattggagcgaattattaattatatccttcctgattaaaaaataacttcctgtttacatatgggatatatgttacaaaaaaatacatatttagtgtcaatttttacaaataactttcaatcgtgataaagattttaacatatgaggtaaatccgtaaatgttttgttttccttacaatatagaaactcttctctttttgctaaaggaatattaattgatttaactgaacaactaaacttgttgtgactttaagtgattcatgaaactttcttattttcccatataaaatcgcagaatgttatacgttgagtaaatagactctttttgatcatgtcgaagaacttaatggctgtgaaaataattatgtagaagaattagacgcgacccacatttattgcaaatcataaatgcgaaatatacaagctgtggacaacgttctaaataaagatcaaacctcaaatttttataaaatacaatatatatattagatctatatagtacgatttatcccaaacaaaaggatagcgtgtggttcgcaaatcaaaccttgaagaagaaactaagctaataattttacttcaacaccaaaagaaaatataagttcacacagtcacatccttttcatagcttttaaagtattatctctacttttattcgttttcataagttactgaaaagtgtgacttttatatccatacttactatatcaaatatatgtgggattaatattcatttatagaaaatttaaatcgcaataactcaatatcagccattaaattttacattattatcgtaatttacatcaaattttgctataaaataaaatacaattatatcatatttctgttttagttgaattatatagtattattttatataaatgtatttcacttttcatacactaattacttattctacaatactaccaaacagaaccaaatttgtttttgactagagtaaacttcaacgtaccgaaacaaaaacccttttgtttatattccccaaatcctcctctccttttctcatcttctcacttcaaactctctctatctttctctctcacctcatattatgaactaaagatttctctgaaagctgacttcataaactttttctgaagaagaaacacacaaaaacgatcgatcttgaattgattctttgtagtattttatttacatatatatatagatgggaagacattcatgttgttacaaacagaaactgaggaaaggactttggtctcctgaagaagatgagaagcttcttcgttacatcactaagtatggtcatggttgctggagctctgtccctaaacaagctggtacgtttttatttatccaaattcatcttttgtttggttaattatagattcttgaatttgaaaattttgtttaaatcttttgtataggtttacagagatgtggaaaaagttgtagattaagatggataaattatttaagaccagatttgaagagaggagcattttctcaagatgaagaaaatctcattattgaacttcatgccgttcttggcaataggtaaagaacttcgtaccgttctttttcatatatgtttgaatatagtatatatatatatataattgttgttttggtttggtttggtttggttctcagatggtctcagatagctgcacagcttcctggaagaaccgacaatgaaatcaagaatctttggaattcttgtttgaagaagaaattgaggctgagaggaattgacccggttacacacaagctcttaaccgaaatcgaaaccggtacagatgacaaaacaaaaccggttgagaagagtcaacagacctacctcgttgagactgatggctcctctagtaccactacttgtagtactaaccaaaacaacaacactgatcatctttataccggaaatttcggttttcaacggttaagtctagaaaacggttcaagaatcgcagccggttctgacctcggtatctggattccccaaaccggaagaaaccatcatcatcatgtcgatgaaaccatccctagtgcagtggtactacccggttcaatgttctcatccggtttaaccggttatagatcctccaatctcggtttaattgaattggaaaactcattctcaaccgggccaatgatgacagagcatcagcaaattcaagagagtaactacaacaattcaacattctttggaaatgggaatctgaattggggattaacaatggaggaaaatcaaaatccattcacaatatcgaatcattcaaattcgtccttatacagtgatataaaatcagagaccaatttttttggcacagaggctacaaatgttggtatgtggccatgtaaccagctccagcctcagcaacatgcatatggccatatataaatcttcttgtatattataaggtgtgtgaatcttcttttttttttttctcaaatatggttttttttttttttaatgggttgtgtatatagtttgtgttatatatcatttaatttaacagtattggtttttacatttttttgttttcatattcgatgtaccttgtgaaccacagatttatggactcggggattttgtttctctattgttaatggcttacgacatttgtttctcaagttttgttcattttatatacacattacatcaaaatttattaaacatatatacaaatactatatatgaaagaatgttacttaaaatgatacgataaaatttcattttttgccaaaataaaaaataaacgatatgataaaccttttgttttaacaaattaagttttggacttcgtagtctctaatatcaaaatctatatactgacatctaactatttttatttttattttatcatatagtgtactcttttatagtcctcctggtttgatattttcacataaattttaaaaaactaaactgaatattcaaaatttaccatacaataaataatttgactcttgaaatttaattaatttttaccaagaaaaaaagaaagattttctcaaagatccaaaacgttaaattatattctaagtggagaatttttgtaaaacgaaaaaacccaacatagcataaatctctacataaatcataaggcttggcccgcactgcatcatttccgcactctttgacaaatatgtggataatttctctattcaattttaaaactacaaatgtaaccatgtaggcagagatggagatgcataataaatgatatatatgtttagtaatttttttcttaaaagatatagtatatgttttgttaagatataaaaatagtaaagaagataaagtaaatatttctattcatatttgtgcaaggtttcaaaatacactagaataaattagtgtacactatatctattttagtattttcaataatgtcagcaaattaatgtatacaattcaatgaaactaatggatcaaacaaaggaaagtcgacaataatcatctcttataagtattgaggaatctctgagattaatattgtcaattcagattgaataattaaggtattatgttctttcttaacaacttttttatatattgatagacaaagcatttattcgtttgactattgtaacatttttttggtgaagcttctaaaaaaggctagtgtatctttatatagggacaactttattactttatctttttctcactttaaatttagtttcatttcaatgaatttaagaaatagtttttacttttttttttttttttttttttcaattttataatattagacattatcactcgtcttttatattccggcagcttttagtttctacttcaactttagtttcactcttggatatggtcaagttctttgctatttttagttgcacttttgatgaacattaaactaaagccgcattcgtaacaacgtgtatatatatgtagcccatccgtagatattaatttgtttgatgttttttaatggaagcccactaaaggttaaatgggcttttaatcaagggactataagcccgatagatatctcaattccatattttttatcactcttatactattttagaaaaccgacgattaaatatcattttcaagtgtagatttcttaataatattatcaatggccgtcaatatgtctttgtcttctcatactaaatctcaatgttctcgtggggtgcattgattggtttgccttgaatataaatcttattagggtcggtcttaccaactattactttgatttattaaatacagaaatgataacattctttgcatattggcaacatatattgtttctcacgagattaattatacatagtatgctcccattctatgaattaagtccataaagaaggaaacgctttgttgagacttaagctttttagatgttttaaactcacatacttggcatcatggcatgatatacactaccaaacaaaacaaatcacattagaggcaatgcagatttgtattttcttcttcttttttggttgaaatttcaaatttatttaatcaacacaaagttatcttcaaaatcaatacaatacacttttttatttattaaaacgtactatcaaaatacttcaaatattttctcatcagtctgcagcacgtgtgagtttccagtataatcaattattattttgtaagtgacacgtgtgggagacctgatcaaggccatccatttgccctaacaaacagcaaaaagccggctttagattaaatcgatagtccttaagcaaaagtgtcctcttaagatgttttttagcaaagaagaaaccaagcaaagctatatggacattcactttgtgtttttatttttctttccaataggtcacgagaaatcaattctttcatgaaaagagaaacttagctccttactttatcaatattgataataattaacataaagtattttgaagttgtcacatatcatgacatgtgttaacatcgcatcattacagtttttttaaaagtaacataacgtgtatataacttcatatacatatagtaccattctccctgcaaaaagagaattctcaaggtaaataacaactatatttggctttaattttgttatagtactaaataaactcccttatagtcagaactaaataccttaatggcaattaaaaacactatactcatacgatggaaaaaaaattagatctcataaaattcttcaagaaatgatgtttttttaaaacggaagaaaatatataatttggcattttgagatatgataagatgatgttttggacagcctcgtcgtgcggactggtcttggttctatctcttgcacaaatcttacgtgtcagaagacggttggcttacgcagtagctggtcaagttcacttagatcagcatagacgatttctaatgttcttttttttttattatggtttaatacacctaaattaagtttcaataatcagtgaatttattgctaatcccaaagttcctaccaaacggatatctttagatgcctaaattacaagattagccttttgcagtcatgagcacggacgatgtatgcggctatgccacgtggaaattgtcattcgattgttgcttaaggtaaatttcttgcactaataagtagaagataccaatatgttcggtatattgttagcagaaatatattaacgaacgtattaatatattacccgaagtcttaaaatacctaaacagattttagatttccaaatttgagatattagaattcaaaaaatccgacttgaccccgacccgaatatccaaacgtccaaacctaactaaaagaacgatgcttttactatgcattcgttttacaagtatttcttagtcttttttgctcattggaaaacttgccattgtgattaattggtttctaacgagtttttcattgatagacttaacatttggcagattttattaagttttggggctaaaaatggaaattcaaagaacggcgataggatatatataaaggtctccatgtcgttatgttttttaatcaaaacattttaaccaaacagcaaaatcaaaatcaaaatccaaagctaaaaaacagatactatcagataacatcaaaatatatagagacacaacaaatacaacatttatctatactagagtttattactatggcttttgatgaagatatgaaaatggcgtctttcttaagagaagaagaagaacaacactattctttatcaagactctccgtttgttccaactacgacggcgatgaagccgacggtgagtcttctgcttccgacgagaaacgtgttgtccacggcggaggagagaaatccatggaggagctaaatttttcagattctgataaagaatcaaccggttgtcaatctctcccggcgacacctccgagacggagacggcggagaggcggtggaggaggaggatatttagcggtgagttctccggtttccggcgataaagcttacgctagcgagaacgaagtacaaaagacgaataacaatcagaggagaaggaggagattgaaaccggagtgtccaccgtgggttgatagtatgcggaggagctacgtcggagatgaacagagtagtcacggtggttacggaggaggagtggtggttgttacgaggcctataggaggaggaaggccattgtgtatggatttagaagaagtcaaagcttgtaaagatttggggtttgagcttgaaccgggtcgggtttcgtattccgggtcaacggtggatactagtagtggcggcaattctcctatctcttctaaccaccgtatttcgagtcccggttagtcccaaaaaagcttcttggctctttgttcaaattccaaaaacattttaagctttgttttttttgacctttttatctttttttggttggatttatatgcacaaaatatctaaacttgagaagctttttatttgcaaaatgctattttcacaaattattaatattagagtgtctttatacgatattttactcgataaatttaatttatttcatgtatcatattttggctatataacaaattaaccattttttagttggtggggaattaaaatatgggcttaacttgatatttcaggggatgatccaaaagacgtgaaagcgaggcttaaggcgtgggctcaagctgtggcttttgtgtccactactcatcatcaacctcctaattctttatgattcactttcttacaaaaaaaaattcacttcaaaaaaaaaataaaaaaaaattgcatgcattttcgagtttcatttttgaaaaattattttcgggtttttgatttgcttaattttttttttacagattttgttctgtttttgtgtgttgacggtgagattttggcaattgatatatggtcataagccaaaagtatagagttaaataagtttgatgattgacttctccagcattgtaatatttaacattttacattattgaaaaaattatactaaattaaactcgaaggtgtaccaaagaaagaatcgttttatactccctacaaggggacgagaaaaaatcattaatgtagtgtgtgtgtatgagggagctatgaagaaacagagcttgtagctactacgggatcttgtggctcatcatcgaactgatacttgttgtaaacttggagcaatagatcacggcaagggacggtggctccaagcttgatacaagccaagaaagcgccggataatttacggtgaaggctataggcttcatcgggtggtggactgagtctatgtttcaacatggttgctcctaaattggagatactagaagcaatgttgttggttcggaaagcatagccaccgggttctgcaaaaggtagacccactatgaaaccggcttggacatgagcgtctagcattacatctgattcatctccggttaagaacccgagtctcctagacatttcaatcactccttcactgtctttttctgcacatgccatcacctgaaaaagaattccataaaatgttcaattttcagaattctttactatgtgaaagcgaaaaagaggaatcggtaagattgttttaccattcgtagatagtcatcgacgaatttcttggggtaatcacgagctgctccgaaatcgataagatttattgtctttgtggcttcattgtataagaagttaccccagtttggatccgtctgcataaagcggaagacaaagagctccttcaaagtgagttctagcatcttcctcccaacataatctcgtgttttctgatctaacaacgctactttatcaatggggatccctgtgagaatatgttaatagcaaagcttagttcatcatatcattataacatatatcggaacagagtaagcagatttctagttaccagatataagttcagtggttagaatctttttgcttgaagtctcatctaccacaagcggcacataaaaccctggagtgtctgaaagcaaatcacgaaagcgcttttgactgactgcttcgatttcatagtcacactcctgcgccaactcttctttggcaacctgccaaaatcttcgtcatgactcataaagacacggaaagattgctcgtttgcaatacatcagagtgtttttctatacctaacatatacaatcagaaactgaatgtattgtctaaataaagctcgataagataacaatacctttatagctctgtctagaaacagtccctttggaattagatttgtataatttaacaagcgtctgacattttcaatatcactttcaatgctgttggcaacgccagggtactgaatcttcattgcaacttctaatccatctttagtaacagctctgtgcacctaaagcatcattacgaagaattaaggaaaaggattcaacacactcaaaaggacgacatatcacatgcattcttcaatcaaaatactaactaagtagttagtacctgaccaatactcgctgccgctagcggttcataatcaaaactagtcaacttggattgccaattggaacctaactcagcatccaaaactggattaagttgactccttggcatcacatcagcaccttgacgcacatattccagagcattcaagatctacaaaagaacctatcttcatgtcaaaaccaaccaaacagagaacactagttgagcaagattggtatataccggagcaggaacgagactctcgtcctgtatactcaacatttggccaactttaagagcagctccacgcatttcacacaatccaagagccaatctttcagcattttccttagacatcaaagacgataacgcaggctgattgtctggtgtcattggtgtcccatttaccatcctatacgtagattctttaacagctccccaagcaagagcagctcctaaattaaaaaaccttcacatttcacaaaatttcaacttgttaaaattgctaaagatcctatcaaacctaactaagcaacaagtgattgattcagatacccataagctcttgccataggagttgaaggaaccttcctctctctaggtctccgtctcttcaccggaggtactacctccgacggagatgatgcttccgttaccgtacctgattcaacagctctaactccaataatctctcccgcttcaacgcctgaaaccttaatctcaccttctctatttgaattcttaacttcatcgctaaattcatttctcaggactttcgaatcaacgattttctcgctaggtttggtgttaacagatctaacctcaggcgttgcgacgacgttatccttattatctccttcgtcgaaataaacaacggaaggttccttagatcgacgaatcgagagttcgcgaagcttcccggaggtaagtccgactaagtcggtggcggcaaccaaagcttttttccctgaagacgttattaaaccttcgagatctccatttctcgctctttgtaactccggtgactgattatagatctctttcgctacaagcgaaacaccattgacgagcctggtaaagctcttgctccacgaactcatcacgaagccgcgtgcaaagttactcttcttaatcgtggatttgactttcctctttttttttgttttccatttttgtcaatttggttttgaagaattttctcgagaaagtatataatgtgtgtgtttttgcgttagaccacgaagatcggagacgtcgacgaggaaccgaggtttacgtggggagccgataaccagaaactgctcctccaaggtttctagtttcggccggcccaattagcctattctttttttattgtcaccatataaggcccattgggctataaaggagttttacgagtagcttccttaaccatttgtgatgttttgttggattgctcccgtaacatgtagttttaattgtccaaatatatttcatcaatttatgatgtgtttttttgtgtgtgataagaatgtaatgttaataaggtttaggaaacgacatcagtaagatcctagatacattgtcccatgccgaaaaggtaaaaaatatggaagcatagacaatcgagaattagatcatcactacatctttaagccgtgaagctttagacaaagctatgaaatgaacgcgataaaaaaattcctctaagcaaaacatggcaagaaacaagagctataaaagaaaaagaaactttaaaatgattataaagcgaagcgaaaatcccttcaacgtgagccccaacctaagaaggagcgatgcaacatgagctaaaggcggcaggcaatgctgttttctaccaacatccccaatcagtagcatggacaaagcaacttcttatcctccaaaagtcatactaacatcttcagaacactatgaaacaatcctataacacctcaaccaaattgaagcttcagaagacatatactaacacctccaatactaacaatttatgatgttaatcaccaaaaaatattttaaagatatgtatgtattagtaatacagtatcaccaatctttggctggtctaactcaaacatttagagagagaccgaacttaaataagagagactaatggttgtaaataatgagattcatgagactagcaaatcttcatgtctaagttgaaaattatcggatccgtcatgtgaaatccaaaaataacgatacagttttgttttctcagataaagtgaaagtcaaaccaaaaaactatataattggctgctttacattaacagtagaaaaccaacaataattgaattttatgctgctactaccaatgttgtaatatgtataagcgttcattatttaaatttatatacaatggccgccaaaaaaaataaaaatatgcttaagtacaatgcatctccactcataaaaggtaacacgagaaagaaattatataatacgaacaaacaaaattgagacccctaagtaaatatgaaaatcatctttgaaactattaatcttctctaactaattttcttaacgtaaaagaggactttattttaactttcggtgatattactccaatcttagggtacgaacaaatattgttattaaaccatttcgaatataaaattggtcaagccactcagaattgtcaggatggtaggcaatatagtatattggattaattaaaaactataacacagtgattagttggcattaaactacaggtggtcatcattttgtctatacatataaaccaaattgtatttagtcttgagatcttcaaaaacatctgagagctttgacaaaaaaaaagacgaagagaaaaatgtccattagagctcaagaaattcaaacccttgaaggtatagtaactctcaatctctctcttttaagttttaacggtttatacttttaatccgttttacatcatttgttaagcttttgctaacctctctaagatcctgagatccaaaaacatacttaagattttgatccacctggtttatattccatctcttagaagttttatttgctttctagattagatcggtttgactatatcgatcatattatatttgatttataaactataagtataagacttctgtttaggtgaaaatcacaagtcctttagtgatattgttgaagatttcctcttgaagatcattagcacaagttaattcaaatccgttattgtttaaagatcatcaacctaaaacattgccaataagtttcctcaaaagttcatttggatctataattttagttttttttttgtcttttattttcataatgcaaatagagagtcaatgacaatttagtgaaagatatatagttaataactttaagtgggtgaataatattggcattttaaatttacataatttatagtggaagattcaattaatacgtcatattttaattttcttttgggggtattttcattatattaaaaacttttaaaaaagttttttttttattttaatttaagaattataaacttataatatataaagttacatccgaaaaagaagagaaatttattctaaattgtagaccgaaaatgtataaaaatacctttactttaacaaaaaaaaaaaaaaaaaaaaatacctttaaaaaatatctataaatacacagcacaaacaaaacttttaaatgtttccaatctaggaaaaaaaaatattttggtttcgacgtaaaaaagaataatattgtagatagaaaacattttgaaaagtttttaattatgaatatatttaattaaatccataatttatatattttaaatgggcccattttgactttaagaaaatataaggcccaaatagaaagcctatagctcaaagcaagcctgcttttagaccgctttccagatctagaagaaacaatgcaatcttctccgatcttattagacttctcttccgcctttcaccacccacgcgccgccgcgttagccaccacttccggcctaacgaattcacactctccgactaaaaaatatcgcctgataacctctttttcgccttcctcgacactgctagcttcttctcgtagatgtttcacctgccgatttggcgacagttctccgcgattcaattcgaacgaggatgaaactgaaactgaaactgatgatgaagatgattattgtttgacagatgggaaaacagaggaattggtagtaggagacgatggtgttcttatagagttgaagaagctcgagaagagctcgcgtcgaattcgttcgaagattggaatggaagcgagtctcgattccgtttggagcgtattgactgattacgagaagctatctgatttcattccaggtcttgttgttagcgaattggttgagaaagaaggcaatcgtgttcgtcttttccaggtaaaaattgtgatcatctccaactttagtgcatggctcttacttcattactgttgaaaagctttggtttgattcaaatttggaaactttgatactaattgtgaatcttttctagtgaaaactgaaaacttagagtggtatctttgttgtgttgtttgaattgatgggacagcagaacttagcattgggacttaagttcattacttcattgctgttgaaaagctttggttagattcaaatttcgaaactttgatactaattgtgaatcttttctagtgaaaacttaagagtggttcaaaacttagagtggtttctttgttgtgatggttttgtggttgtttgaatagatgggacagcagaacttagcattgggacttaagttcaatgccaaagctgttctagattgttacgagaaagagcttgaggttctgccacatgggaggagacgtgagattgattttaagatggttgaaggagattttcagttgtttgaaggcaaatggtccatcgaacaagtaagtatcatatgaaagtcctcttatgcatctatacctttgctattcttattctgcgtttgttttgtgacacagctcgacaaagggattcatggggaggctttggatttacagtttaaagattttcggacgacgcttgcatacacggtggatgtaaaaccgaagatgtggttaccggtgcggctagtcgaaggaagattgtgcaaagagataagaactaatctgatgagtatccgagatgcagcacagaaagttattgaaggtgttattcatgatctttgagttttttttctttaagccaagctgaggtagtgttaatatagatacaagataagcctatatagttttttttttgtgtatttgaaaagcttatgtaattggttctacatacacgttgttatcaattgtatattctgaatctttaggctttgaatataccaagttttgttagttactatgtgattgttccgacctagtatcaggtaacatacacgataaacgaacattaagtgcaaaatacgcaataaaacaagtgaactaagaatgaagatgatgcctactttggatgaacaagggaagcttatgaaaaatgcaggtttagtaaattataatactagggttttcttcagaagtgtttcctgtaaattatcattaattggtaccatggaattgagttcagtttaagttcagggtgagtttaagatgtttcagaagatcaattataatcaaaggttgatttgtagaagaagcaaagccgaagagaaaattgtaagtaccagttttgttacttaaagagtgctctgtttccaaaacagagtcatatgttttttcatggtcgagaacatagtactatgtttaagtttaagccacagttcaaatcagaaatatattcgcaaggatgcagagttactctgtttcttttgggccttttaaatgcttttattttggcgatattaaactaacaaaagaaacaatcaatttgaaccatcagctctactccacgcacgcaagatgatatatgtttttgctaagatgagagcaaagcgaacacaatagaatatattgtggaatccaaatgtatcagaaaaaataaaatagaaaaatggatcaattaaatagtaggagaaacaacaccatatatataagtaagatgaaatttacgtaaacaattaaactctagcatgcagaattagtaggaggtgaaccaattgagattattaaaactttgaaattacaatgttttggaaaactaaaaagcattacaaaatagagattaaactctggaaataacaaagagggagtgcagtagtaggggaaaaaaatctgtaatcaaattcataagattttgttttgggatcatgtgttagcaattgatccccgtattcaggttcacaaaacaataacttgtctttgtcaaaaactgctagtggtctgagtgcgaatccattactcccaaacaaagaagaagttatattgagatctatggaatatatttccttccatgtcttgtgatctgaatccaacgaccatatcacttggttgggccacattttttctgatacgcacaaacgatcatcaaggttgcacatgatcaactctctactagagtagtcgtggtggtggagaaagggagctttagacacgacttggaaagtttcggtatgaagatcgaaagacaaaacattggtggtgagccaatgaagtgacccatctacatatacaggatcttggtaaggaagtatccggtagggggacgccgggacaacaaacctccaagccttggtggtaaaatcaaaaacttgacaaaaagtactagtgttgttgttgccttgacaaataatactaatgtcgtcgtagtcctcgtcgtcatcgttaaggccgcctaattcagcagaattatataaccaaactggcttgtatgtgccattgattttgtctttaccgaatccaagcttagcccatgatactgaaccgacctggtgttcataacgatcgagtcgttgaaaggtagaaagagggaattctcgatgccatcgagtggtgggattaacaacaatattccaagcataggtattgtagaggcatatcaggccgtcacagctactctggcaaactttgtacaaggtgtcttcccaaggagtaccaacgttctcatagcttgatgcactcttttaagaagataagattcatcagctacggataccaaaaggacatctggattacatgattgcctacgatgcatcagttgtctttcttggaaagcacggtatgtcggtatcgtagggtagcaagtccatattatgtctttgtctctaaatctgaatgatgaagagaaaggagtccaaatatcctttatttatacacaacatatcccaatcccaatccaactaggatacaaaaaaaaacaaatctcaagttgtttctgattatatataacatcagataattacgagaatttatatttatcccaactattttaaattggtttaaggtctagcatttatcctaatttcagacgaaagtgactttataactttattttgctttcataagaacaaaacaaaactcatcttgtatacattttgagagctaacggtatgattccagagtttatgtatacaacttttctcaaagccaaaagatacaaaaaaacaaggacaaatgaatttatatttaatgggaaagatataagagttttgttaagcgacgtttatgtattgcctataatactatgatattctagggtttagttaattaaaatactagggttttcttcagaattgtttcctgtaaattatcattaattggtaccatggaattgagttcagtttaacttaagagtgagtttaagatgtttcagaagatcaactataatcaatggttgatttgtagaagaagcaaagccaaagagaaaattgtaagtaccagttttgttacttaaaaacagagtgttctgtttccaaaacagagtcatatgctatgtttaagtttaagccacagttcaaatcagaattatattcgcaaggatgtaaaatctttagactgcagagaaagttgagaatgaatgttgaggcgatattagggaagaccttaaaagtaagttgtttgagacatcctttatatataatagtaaacatcttccttaaatgtacaaatacaatcatcactgcttgagtcttctccagattataaactctctggaagcaagactataataaggctataaaacaagcagcttatcgcagacgatgatgatgcaacagaggaagcaaaaaaacacccaatgcaagtaaatacaaagatacaaaagtggactaaacccgttattgatattagaagttaacgttgctcttgaagctctgaccaaaccgccaattcgaaggaacaacgttgagagctgctttgatacttccatcactaagttgaactttgaaagatagagattgaccattaaggtaagtattactctgataattagctccccaatttcttgacattgtctcccatttgttgctcttagatcctttgatccaaactttagagatctcaccccctcctgctacgtttgagatgagaacaagctcgaaatagtttctaccgtttattgtaaatctcatccctccgcttcttctacatccaacttttttgtaaagaatggggacgattccagctttgtacttagcgatggtgagaaacgcaggctgagccatgtcgaaatgaggtctcggtgggttgcaccaacctccattgtcgcttgcctgagcaaagttcggtggacagaagtttgtagctgtgatagtgattgatttgcctttaagacaccattgtggtactttggttgcatcacacaagatttggtaacatccaccgcatgacttgccgtcgttgaacagggccgtgcttaacgccgcggtgtttgtcttgtagccgtctgtgtataggtttccataaccacaagctccacctgaagaagaaagctatgagaaggtttcttgttgaagaaggaacattattttttaaagctctcattagggtaaaaccaaatgttcatgtctagtttatgagacttacccattgtaccagaggcatcacttccgccataaaaggtcgcatgagcttgcaaccaaccagcagaaactgagctgatcttcatgaagaacattgtggagaagatcattgcgaccaatagagagaaaatcttcgtcattttgttttctttcaatttcttaggtgttttaacttttgattagagaagaagttgaagattgttggatgcataagacttaggctttagcagctatttatagtagaactcaaagagcttgtttggattaagatatatgcataaattagttagatatgacttggaattagcggaaaacgttgaaaataataatatgatttggtgatgattgattcaatgattgtaagaagtgcgaaaaatacggagttttcaggcatatgataattaagttaatcctataagtgcatgtgacttataggtagttgtgtttagtttctttcaaatattataactttttctcactatcccaagttttatattatttctcttgtcaaccaagttatatatatatatagttttttagccaatgagtggtttaattacaggtaaattggcgttaattgtacataacaaaatgaagaaggctatgaatggtgacatagaccgcacccaaaaccgcaccgcaacagtgctgtaacagtatcaagatctctacatatacatatgtatctatgtattttcgttactatttgaactgcactgcacttctcccgcaccgcaaaacgacaatcatcattcagaccctaagactagtgtagcaacattaaaaaccatttttttttttgaataaagaaaaactatttccaaccactttaaccaacccaaatagttttcttgtcttcgataaaactatcggttaaaaatagaaaacttggataaatatcaagtgtagaaacagtcgtcccgcagtacataaacctaagttttgcatcatgttaaataaaacatttttaataaaactcaacatgtaattgtgtgatatattacatgtaattgtgtgatatattacatgcaattgtttttaagtacaacttataacgcgtctcgtgagaatagctagtattatcattacataaaatagttctttggtatacgagttattacatagatgtataaccaaatggcaagttgtcttaataattggcaatgaatgtagaattcgaatatcatattatcaatgagcttttgttgaaaattcaacgtacgatttatcttaaaaaaacaacgtacgaaatcaactgataagtgctcctccatttacgtaaattccgtggtacgttgcaagttgccaacttacgctgatgataactagattatctatgagtatttggtatttgaagttaactgttttacagtttatagttgactaagtataggactgacttctaaattctacttcaaccgaacaaaatatcaaaatctctttgtagttcctccatgaaggttaatgaacttctttaagtttatttagattgcttgatatccatattccagacacagactgataatcaatattataaacataactatttggctcttcaacctactatataaccttgaaatttcaaagatggtcgaagtcaaacgttataatacataagtacgtttacgtaacattatcaatttagcagtcatgtaatataaattatagataccctaatatcatggcatatctaatggtaagtccacgtacttatcacatggatgatgcgctgattccatttgataaactcacacatggaccaaccactctctatttttcaatgataaattccgtattttcaaataaataaaatgattgacaatcgaattatactgttttaactacactatagggaaatagaaaaatataagtgctttaccaaaaagagaaaaattaaagtaccatggtacagtacgtataagcttacagatatattatgtataagaaacaaagtacgtataaaattaacgggttgactgaattttcagccctatactagttggaatctcaacttttcaccctaaacttttagccacttaaaaaaccatcataaaaaactttaatctcgataaaactacacatactttcggatttgttcttaaaactacgcctccaattaaaccgaccagttaaccgataatttttcatccggtttgacttacccagaatttaaccaaaattaatccgattttgattctattttagcaattttgacccaaaaaatgtaaataaattgtcttcttaagaagtaaaagtatttttattaatttttatttgtgataaacaattaaaaatattaaattataacttaattttaacaaaatttaatatgacaaaatataccccacattatattttgagcctacattttgttataaaattttgataatatacaaacatatacattttccttttggcaatcatttctatttttttataaacttaaagctatgtcgttttttaaaacaaaatattcatttttcttgcaatcataatatatgacctttgaactttatatacataatgaaattcaaaaaatatgccaaatttatttttatataaatatatccgtaaacaccacaatcaaagtatatattatggtatttataaatcaatttttctttatagattcagttttctttttatatattcaagatgagttttctttttatatatatatatatatatatatatgattatgtgttttaagaaagaaaaagacctttgaattattaaatttagagtatataccaaatacatttatataaataacaccattgtatttataaaaagaatttgttgtctattttgttatattattttgcggtatatatttttattataaaagaattttggtaaaattaattaatttagtatttttatcaaaattaaatgtaaataaataaatagtattcttcttctagagaatatattttttgggtcaaaattgggttaaaatagagtcaaaatcgaattaggttcggttaaattttgggtaattcaaaccgggtgtataattatcggttaactggtcggttcaattggagacatagttttaacaacaaatccgaaagtacgtgtagttttatcgagattaaagttttttatggtggtttttcaaatgactaaaagtttagggtggaaagttgagattccaactagtatagggttgaaaattcaggcaacccaaaattaatagataatctatcaacttagtctacaacgacatacaaatatagccgttcaattcaccaggatttcacgcaaagaagatattgaaggtgtccatcaagcgcattgagaaggagaaggaggtgtcatcaattgtggatctaataaggatcggaatgaattatccgtgataaaatcgattatataacagttctcataatttgtaataaataataaatctataccgaaaaaaaaagtacaactgtgtcaactatttaatttaatgatgcttaattaccacttgattataagttccaaatcgtgtaatccacttactaaaaattaagaattttaagtttaagttcttcatttacgctacaaatcaatcaaaaaaatgataaaacatagatgaactattaatctatttgtgattaaaacaactcatcgttttatgtcactaatcgggtgatcaaaagacgaatatacgcaaccaagttaaaaagtagaaatgatattatattgcttaagttgaagtgtttatttgtataacattttcacagccaaccagaaaacaatttctagtcaccggaatcttttactggaaacaacaaccataacatatatatcttacaaacaacttttcatctttgatattaaaccgatgcaacatttccatctttgatcttaaaccgatgcaaccggaagatcattcgaaccggtatcaaccctaaacacattcttgcttgaaggcaaaccagctactggttcatcttcaattccacattcattagttcctctccttatcatgaaataaccatcctgcaaatttcatacatgtcaacaacattcatatgaaaacaaaactaaatctagaactattcgtaatttagtactaataaaaacttacatcaccccagcctctgttccattgatttgccatcaactaaacacaagagaaaatacaaaccaagaacgttataaatttcggttaatttcgaattctcgataaaaaaatctcacgaaaatgtataacattacccaataatcttctccttcactgctagttccccaaccaataagtttaacagcatgacctccaatgttagaacctgttatgtgcttatagactccagatttgtaatgagcaaaatcctaaccaaagcaaaccattaatgatacatctttctttaacttctattcaaaaacaatcttaggatttaagttttattacctcataaacggtaaaagagacttcaacaggtccattcttataaacctctgccatgatatcttgtggattagatttcacagtgtatgtactaacactgtaatgcttcgactcgctccatagtttgttgtcgctaacgcatttcctcgaacatttcggtgtaggatatgccggttcgcaacccgggtgagagcatccggtattatcaaagtatggatcacactaatagaccaataaaaacatcaccaaaatgctctaatttaaaaccataaccaaattttgagtgttcctagtgagacaatgatctttacctcttctgtgacaacaccgctatacgaaaagtattgccaagcagcaattggatagccaccgtcacaaccatcaccacaacggaatccacaacaagctaggagatcatttactgataaagaaatgttctgaattgagaagaaaaaaaaaaactagattaggctttggattattagtcttaagttggtaattcaattgaatattagtattattaccatgccaaattggatacagaatctatctgatagtgattcaacagcaccaaatgcccagcaagaaccacaatgtccctaaaccaaaaccacaaaatctcataaaaccatttattcctctagacaaatctaaaagttacaagatacacaaaagattgataatttacctgatctgttcatagagcagtcaacacacacacacaaaaaccaagagttaataacgaaatgcaattgaacactaaaattgtgaggaaaaagctaaaagcataaaaccaaacctaagatgtttccaatactagtgcactgtggccaagcagttctagcatcaaaagctttaggtagcttcaaagatggatcatggctcacaataggaacacctaagaaatgcttctttggtgttggtttaacaccgagaagacgcttaaactctgcaacctgtaacatacacacaagtttttaagaacaaaatgattaatcatcatcattagattgttgttgctcatatagagatttaaaggtttttacagtggcgtttgaaaatcgatcatttatagcagctttccatccagcgtttgggttttcgttgactttcttcacaatctcatcctaatgaaaaatcaaaatcttgattagtgcaagaaatcagaagaacagaacaaattacgaactaagttaaacaagattcaaacctgaagtatcttcgagtccagtttctgtttggtaagactttctgcttctataccctgattaagacaaaacccagaagactttagtcaacaaagtttggatctttctttgtctttctattaaagtatagttttttatgaacgaacttgatcaatattggatctaaactaaaacacagtaccaaacttcgtaactctttacacaaatcaaacttaagagaaactaagtaagatgatgattatgtaagttaccttcaagtcaaaagccaagagaagccctaagagcaagaaaacagaggccaaacagagtttggtattgtaaacagccatgaaaacagagtctgcttcttagatgaatccaatttcaaaaagatctgtttgtataagttaaacctcaatggtgggagaatgaatctttttctttataatagcaaaaagagagaaagagagagagagtggcttatctactgcacaatgacagagacatttcttgggaaactgaatcagccaatgactttgttaagagccaaaagaagatcttagccgttgattgatgcaatctacagaattctaggccgttgaaggtatacatgattgccacgttgcgtcattagtcattacacatcgttcgtaattttttatgggattggagttggaccctttgttacgaaatcgcaatgacaatttaacaagcatcaataagttacctgtgtaactcagttatcccaattttgtatttttttggttggtcaaagttatgaatcagataaataattttggtggtaaacttgtaatttttttttttgatattttatgagatctgatcaaaatagtcttcgtagttttgataagaaaattagaatttgattacatggcatgattacaacgggaattgaggagagctttgttgagacaattgaaagcatcgatgtaggagacaaagcccatgaaccaaaactcaaacccatctcgtgtcaccatatgcacgtatctctcacttggcttcaacacgttcgttgatgaactaatgctacttatcttctcccactccatcaccacctatcaatatacaacattataatacaatatcacatataaattttattattgctcaatatattatatagtcactaatctttagaaaccaaattattattttcttattttacaaaatgaaaacagctatttcacaaagaacaattcaattcttgttaccaataccaacttagatctttttttttaagtatgaaccaaacttctattacaaaaaatattgtttgaaactcatggtctaaccttgtaatatgccgcaacaccgtttccaccggcagaagaaggaagacgaatggcatagtcgctacaaaaagcgattcttctgttggaaatgtatatcactccggtcactggtcccgaagtagtcgatatgtagcaaacaaacgaatctaaaagtttctctacagctaaaacaccaaactctcgttgaaacactctctctggtcctccttcaacgatcatcttagtgccttgagaaagcctagccattgctgcatcacttatgctaggactaaacttcactgttcatgcccggtttcatgcatagaccatatgtaaaaaaatgttttagggatcgattaagaagacaacatgtgtaaaatataaactctcacgtacggtggtcttttaaacctccgactaatgcttccgctttgcgagtagcgtcctctactttcttcccacagcgattcaacacctcaagaaccttatccttcgaccctacatgtatcatatatcaatcaagatttatcataagcataattaagacacgaacaatcattttttagacttactcttatcagaagctgatgtgggactagtaatgtggacgtaaggattatcataacgaccgccatggctgttggttttgtgcttggccgtcgagtctaatttatcgttcacgtctttgtattgtggacgcatgatattagacctaatgatgatgatgcatggtgatggagaagacgattaatgaggttgaaatagagagaggcccgtgggttgtacgcgatgggacctttattcgtattgctttttaaggattcggataacgatgtttgattctccatggatggtgtcaaggcattgtaattatgcctttttgatgataatattaaagaaagcttgtaacaagatactaatataaagctcctaacaagatctggaaaattttgaaagtggtaagaaaaggaggtccgaagtcggaattggaggaggaagtttagactttagattacatgcctagggaaatctatcacacacatgcaatcaaacacatggttaatttctagccactagtgtaactttaaatcttaacttcctttctaatttggtataaaaccgatcacacacgattagtaaaagataaatttagatttaactgtaatagttttataaattctaggcatgggcgtttgggtattcggattggattttttgggttcgggtttttacggatttagaaatctaaaacccgtctgggtattttaagacttcaagttcggatcgggttttttgggttcggatttccggttttcgggtttaaaagtgtaggatgcgttggaatattttaaaatttcgggtttagattcggattggtttttttgggtcaggtccggttcggtttttcgtgttttttggatcggattcggttgggtcttcgagtagtagtaataaattaaaccattactactactactcataagaggttaaacaaagattaaattttcaactcataattcctaacaatttataaaaccataacgcacaacataaacgcagttgttaattctaggagagaaaaaaacagattcgtaagctaatttgaagataaaataatctgtttttaagtaaaataaacagattagtaagtaatagcaaatccaatgattagtttctaagtaaagtttctatgtattttttattaataaatttggatagtttagtagtttagagattttttagagtttttgaaaattttattgaccattgatggaatccttaagtgggtttctaaaacaaaaaaaaattgaaaaagggaaaaactgaatctacatgagaataactgttgctggataagcttaaaggaagagagaacatctttaatcattgtttgcatatgccattggcttgacatccgggtgaggctgtataatcaacaatatcagaaaattagaagagttttcgaatgagttcaatatcaaaaagtaagaaacaggagggagatgaatattaccatgatcaactcggtttcaacagatgtatataatcaacttggcttggtgaagctccatacagttttctttgttgttcttgtctccttatgttacatcgttgatagttaatattattctgcagtacactccagctatcgacgtttggagcattggctgcatctttgcagaggtactaacatggaagccattgtttccgggaaaaagtgttgtccatcagttggagttgattactgatcttcttggcacaccaaaatcagatgcaatttctggagtatgatccgtttttattcttcacattaatttctggagtacgtatatatattgaactgtatagctaaacatttatttctctgatgcaggttcgtaatgataaagctagaaaatacttgactgaaatgaggaagaaaaatcatgtcaccttctcgcaaaaattctctaaagcagatccattagcactccgtcttttgcagaggctgttggctttcgatcgaccgactcctacagaggtctctattctgtctttttcactttgtaattagattcttagaacctcagatccaatgcccacgatcttctctccctttcatctgttacaacaatctcacggcatttcctttcaagaccaactgaacttgttagatcttgtgaaagataaccttttgattttatttcaacaagttctctcccaaactgaaccacaataggatctaaaccaagtacgcaactttagaaacagcatttcattgattagtgattagaaccacaattattagcatatatattggtatagtgagtgattaaaccagagtatgcaataaaaagtttaagcaccaggcatcattgtgtagattcgaagccgtgacaagggccacaaaacaagagttgaaatcacctgcagaaaaagagataaggaataagataaatttgatagcgattcaaagacaaaacttgggagactcaaacaagagtaatacgaagagaagcttacccaaccaggcgtaagaattggtttgcaagctggaagctcctgctgtgtaaatttcgaatatgaagatcaatcaacttttagctatagcattctcgattcctagctaagacttccaatcgattttgtggcgtcgaaattttcaatcgattttgtgtctccgtcggcgacacaagaggaaaagagagaagaagaaaagaataaacgcgagaagcttttttttttggttttgtcaataagttaacccaataaaaagatgccacgtatgggtcgcgaaaaacccaattttaggaacgtttctaactgaattgttgtgttttttgttcaactgggcccatttcaggttaaaaacccaccataaaaatctactaaaaacccttagtggacttgctctaaggcccatcgagaaaatttgcgcttactaatctgttttttttttcaagaaatacccatctaaaggttaatatttacgaaatccgccactgctctaaagactgtaatcttccttcttggtcctgcagatccatgtatgaaacttcccctgaaccctaatttagctattcgaatttcgatgttcacttctaaatcctcgattcgtctctgaataactccatcgtaatcgaactgatttcaagacggttcgtttctttttcctcttatcccagatttcttattcttctcctctcgccgccacagttttcgaaggtgaatttgtgtccatgtcttggaaaggagcccgaggaaaaccaaaaggctatggcggcgattatggcaagcctgagccttttgtgattttccctgaaattacgttaccagatccaaaatcaatctcaacagactcgcaattagttcaaagctactttactttcaataagttttggaggaattctccttatcacttaggcgatggtggtgtttctaagaaaggtatcaactttatacttttgtctttgtaatctctgcttaaagctaaaagctttttcttttcttttttacaatcatcagagaaagagagtttgaacattgagaggtactcagattcgttgaagccgaagatgaagtctaataagaatggatctttctttgattttcttgttcttagacctgataacttccctaaagaacttcttggaggtttgtttttgtttccaccatctcaatactctttagatgtgtttagtttcatcttgctgattatcatttggattatgcgatttcagatactcgaagagaacaacggcctgtgaagagagctaaatggagtcaagaagctggtacattgtctttattattagtttttgttttcaacaatgtaacgagaagtttaagttctgtgtttttgtttcatagatttgcagaaattggatgtgtttgagaagcttgaagctaagtttaaggtaactagtgaaacttttaacggttcaatggttttttaagagcacttgacagtaatgtgttttggattatgtttggttaggttgaaggcaaggaagagaaagaagaaggggaagatgatgaagaagttgtggaatcagaaggagaagaatctgataacggagattatgatcaggtttttgcttatttttcagattaatgtttgaattgataccttgtgtgattcttcttcttcttctcaagttacttaacaactttgttcttgaatgtttttttgtagaatcaagactttgatgatgatgacgacgattataataacgaggatgatggatgtaagagtcatcatctttattctaagattgcatcctttaaactttaaaaatgattctagctaactttgtttctctcttttcttgccagtagttgaagaggtgtattaagctgcttctcctttttcccaaaacaatcaagttttgcagtcaagagaagctaagcctgtcccaagctttagttttatttaaaaactctcaaggcatttatttgttttgttcccttggttcttatcatattggaaccatcccctcgaactgaagaatatgaaattcatgttcaagcgtacaaatttctgtttggttgaaaatcacagagctttacgttcttcactcaagaatttcactaatcttccataaagttagtaaccactgagctttagtgtcgtacatttcgcacaagatgtctatttgattcgactaatattcaatttagacaaattcttcaagctaacaaagcaaatcaaactttgtcctcccaatgctttacacttcttgtattgctgcattaattccagctgaaaccattaaaatcattctggaagcgttgttgcatagttttcatcatgtgttaagaacgtaacgctgttcggttacgtgtgttgagcaagcgatcttcaccattcttgttgaaacttagttgtgtatatttttcactgttgtgatgatcttgaccaatctcgttgaatctttgaggtgtatattattaactgttgtgatactacctcctgtgttcatgtaatccaacttctattgtagcctgttattattattgtgttatcccatgatatccacgaggcttcatgtttttacttttacagaagtacacagaatcttcttatacaagagttttatcaattgatagtgcagttactactaatcaaacccattttatattatcttcgtctcttaaacatcattccttttgctacattttgtttcttgaaactatttggctaattcaagtgaaagctttggcaaacaataatgtgtcttggttcctaattacaatgatacatatacattggctcctaattcctgtccaaatcaaagtaatctagagaaaactactagagcctaatcagaagattaaaacaaaaaacaataaaactaaacttgaaagaacaattcagtagatattcgaatctatccattgaaggatatttggaattgaagggcaaaaaaggagagagctttttcacacccaaaactgattcggattttgatataagcctctgtctgaacaagaaggtgttcctatatttcacattcccgttattcggaggctattcatatacatatcactctatacacagattcttctgtctgaaactttttggggaagaagctttgatttgaattaagaaaacacaaagaagcttctccacaaaaaccaaagaagccacgaatcaaaacaatacagaaaagtattgaatgatcagaattgatttacgcctcctaactaagccaataagtatgaaattgcctaaataacttagggttcataaagctactcaaggaggcggattttatccccaaatatcaaaacacaaaacaaaaacgatagagattaacaaagagacttatgaggaagatgagttacgaagaagacaagagtggcgcaaccctttttattcactctgttttctagggcttttcttgggttgggttgtgaatgactattttaccctccctaattgactgaccggttaatgtaatgtggtctggttttcttaaaccactcaatctgttttaaccattggctttaagaaaaaaggcagagtaagatctgtgaaaattaaaaaggccagcaatattctttgtacaatattacaaagtttgtaaggttacatgaagttgtgatttattttggtggtgtggtgatggctgatgcaactttgcaaacttccgcatagcaaatatctctgcccgttttattgggacgtgtcgtgacagtcgcgttgcttctgcgggatcattccattggggcaggtggacgtgctttagtgaggggcgtgtaagactcaggttagaggaaggaatcgaactgttcaagagcatgaagacaagatttggtgtcacaccggttatccaacactatggatgcgtagtagatcttcttggtaaagcggggcagatacaaaaaggcttatgagtttgtattagctatgcctataaagcctgacgctatcttgttaagaagtctttgcaatgcctgcagcatttatggagagactgtaatgggtgaagacatcggaaagactcttctcgagatagaacgagagtaggagaagctttcgggttctgagtgcgaagattatgtcgctttatcaaaaggtagagaagctgaggaaggagatgaaagaaagaagaatcaaaacacgagctggttactcttttgtttaacatagcttgttacaggtcaggattcaaaacactactcatttagtttcatcaagtcattaattaacattacacaacaaataaacttgcaggtctcggttctgttaaaagctctgttatcccctgaggactctcttgtcttcttcttcttctttaagcacttgcatcacatcaacatctacacacagataaagatattcagatcccaatcttcttaatcataacgttgttatgaacaaagtcttcttaccgtgtagaatcttgtcaaactcgatgtctcttggtctcttcttggatttgtgctctgtatcaaactctttgcctgtaatttcaattacatcatcgtcgctgtcgatgatatgaactgcatccagaggatagttggtctcgcaagccgaagcattgaagattattacacggaaactcgaattcttcttgtattcgaacaagagaaagtggccttcctcgatggaatgagcctctgcaaactcactccaaccctcatggaaccaaatctcttcaccgatccgtttaagctttatggaacgcttatatcccgcaggagtcactaatgtaacaacctctgagagtttagacccttgtagctttacgaatcttggcggaatcctctgctcaaaaacataaatagattttcagaaacaagtaacaaaatgtcagatcttaaattctctacatttcttaagaacaaattatcaaattagtgtatcccttttagatctctaatccaagataaaacaaaagaaatggacactgtttagtgaatctgcagatattgaaacaggaataacaacacacatgcaaacactttatttcaagttttttcaaagtattaggtaattaccatcatcttatccttcatcgttgaaggtaagaccaacttgaagaacttcttcaccggcgactcaggatcttgctgtgattggcggtgagagactgaggtggctctggccttcatgtttcgggtaataaccatttttgtttgccttgctcagacagagaagagaaggagaaaattgagagtagagagtgatgagtggagactcgttaaagaggcgtaaaagagaaaccgagaagccagataagttttcttgtcgttatgttagtaagatttttatctgacgagtgtgacagagttactttaactcttatgtagttttccaacactctttttgtacagttctcaagtcaaaagataagtcttaccattattgaagttttttttttccttttggtatacaaccttctatttacatatataatttttgtaagaattttagacaaaaaaaccttaaaatagtatttagtttttaatctttacaaaatttatctaaaaattttttgttctacatttatttttgtatctaatttatttgattttatatatacaatacatatactcaataaaatattagtttttttttactgcatataatgtaatttaaatttttaaaagaaaaatatattactcaattgataaaaaaaacatgtataaaaaattctatattatttaaaaatttagattatggttcagagtcatattataaaaaagaccaaattgattttgaatacgaaggaacaaaaagcttataatgggactattgtggctgttaaaaaaagcatccaaattaaaagtgttatctcgtttactctggttctttattttaaagaattgaatcaataattttttaaaatattataaatattaagattttattaaaagttaattattacaaattttacgacttttaaaagttaaactttataactataaatatttaaaaatatatatggtgaaattaaaatatactaataggacgatatactacaggttagatccaaatataataatcaaaatacaattataaagtttggatcgatattaatttttttttaagtttgagacattaataatatttgaactctatcagaaaatgacaaaaaatgtttaatttccctggatgtgatttaatgtgggatgagtttggatcgatattaatatgagatgatatactatgaagaaattttataattaacaatcaaaatacaattatacgattttaaaaactaaacaaaactaacaatattaacaaaacaaatataaggtgtatcatacataaaaaataataacatatatttatagatcatcttaaaaacaaaaatttaatttttgataaaaaaaaaaataggtatatagtatatcttttaatatgttgttcaaatattaaaaatattaattaaaataaatctttagttttttgcaaatcaatctctagtataaattttaaaaaatagcatttaaattcgcttttatcaataaccaatgtataattagttgctacatgtcataacaatcaaagcctagtttctaataaagactaacaacacatattcctaataaacactgaactagattttaacccgcggtataccgcgagatgatttatttttaaaaagtaatatatattaaaacttgcaaatttatttttataaaatatttatattttacagtttataattgttattaagtaacgctataccacaaatccattagacaattattaaaaaactgaagttttaaccctattaaaacaacatattaataatattttaaaattttataaatattgattcaaatacatccaccatataactcaattccaaaataaaactcgttctgtaatttctttacccgtcccgtgattttttaattaaagtagtaattttaaaaatttaagaattatttattaaatataaaagttttgcaaattgtatcattctctaatacatttatattttatagtttaattttatatatagtaacattatacataccacgtaacatttttggttttatataatcttttctaaattaggatgatttgatatgtttaatattagtggtcttaaaaaataataaaataaaaatttaacccgtattgaaacggtggattaattagattttacttttttattaatgttgattcaaaaacccgtccctccaaatccgtcttgccaaaaagccatttattttattaatattaattttatttatgatatgactctgaattataatctaaacattttagctaataacatagaaatgcaccatatttatttaataggagaatgtactatatgaccggaatgcacttttacccaaatccaccaaaaaagtcttgcaaaaatactatagacccgaatgtaccatattttttttgtgctaatttttctgtgattatgatttaattgatttcgtatataaaatattaaattgttttacgaacttatttgtttataatttggtaacagatagatatttgaatattcggtatattttgcttcagtttaggaaatctttgatgacccgtctttaaatccaataagccctacaattaagagatgaatattgtcgttaaataattttggtaatcttaatgatgtcattaaaagattttgtttttgatttaaattttctaatggcattgtcatgtaattaattacaaaaattaaggttacatttaaaatgtatttcccaaataatatagtaggatatggagatatttatacaatttactttttctttacctgctttggacatttggacttgatatataaaaaatttaatttttcctaatatttcttacatttcaatattatataacctaaaataagataatgaatttcaaaattcttatatctgtttttggtgagttttccttttttgggctataattattgactattgagctacaaaacctatttccttttttttttttccaccgtgtggatctcacgcggttttgaaaacagcaagacgttcatacgtctaaagctataaacgacacaaagtgctattctccttttctgagttaatgttcacacgtgggaagccaactgtaaaatcgtaagcatgcgcgctgttttttttgttgctagccgttataccaactgttcctcctactcatacaccaactattaatttttaaaacattcctcttttttttcccaacaataaataaaataaaattttcttcactttttttctttttcaatttgcttttttaaataatttaatatataaataacttcttctctgtcaaagatttttcctgattctttcttttttcctctattgattttttttttgctcattcgttgtttcctttcaggaaaagagaggaaacaacgtttcgtcttctcagattctttacctttcttaaggaaaaatcccaaaagagagaagataaaaatctcgcattcagattttagggtttctgacaaattctccgatgaaattcaagatccgaatctcggcaatgtcgacaatctcgccgtcattagccgtaattgcgtttctttttctgattcttctgaatctatcttcggttttcgctgatccttcgacggaaggaggagagattattaggttaccttcggagaagatcaacggtgaaaaaaacagaggcgaattctgtgaaggaattgctaaaccggcttcgtgtccggttcagtgtttcaggcctgatccggtttgcggtgaagacagcgttacttactggtgcggttgtgcagatgctttgtgccatggtgttcgtgttgtgaaacaaggagcttgtgatgttggtaatggtgttggtttgtctgttcctggacaagctctgcttttgatacacattgtctggatgatgcttcttgggttttctattctctttgggctcttttgattttggttctaatttctctgaatcaaaacaacatatagaagattgtttaggttttcagattgcaaatgacgaatcttttttgtttatactcttctttttttctttatattgctctgtattcatattacattaaaactatgaggaaatattattattatttggtttgtttcgtacaaaagaagcttttttgaatcttgctttctccatctctttcccaagataatccaggattgtatctgttacgtggttaggtaaacaacctgcatctaacattgctttcaagtacttgtatgcttctttcaatttccctgctttactattcacttcgatcatcgtgttgtaactcacaacgtccgggtttattccattgctcttcatgtggtcaaacagttgtgtggcttcatctaaccgggttgctttccccagagcgttgatcaatgtgttgtacattacaatgtctagatatcctccttgctttgtgagtctgtcgagtaccgcgctggctaagtctgctcttcccatttttcctaatccttggattattacattgtatgttgctatgtctgctgcacaaaagttctcaaacatttggtcaagcactccacgggcggtttggaagtaaccctttttgacaaacgagctcatcatggagttgtaggtgtaactcgtgagatcggtaacacccattccattgaatatctcaaacaatttgcaggctaagctgagatcccctttggacagatatatagatagaaacgtgttcatcatgtctacgtcaaaagaatctggctttgcttcgaccctctgtcctcttgctaaaccaaacaagggcttaggttgatttctctggtgtgctaattggtccatatatggagatgatgaccaagggtcatcttccattggtgatacttcctcagcactagctccatcgtcttccgaacctaccatgctcataatatctaggaagcttcctttacttggaaacattggggtgtaatccttatctttgctctgtggacgttttagtgaagcttccactccagcgttccatctcagaacattaggcaccaagttaccttcccttatgtgcttcatcaacttctctttccaatcccacctaccttgtttatgaaatccgatcaagagtgaactaattgtgaccaaatccacagagaaacctctagtctccatctcctctaccaattttactgctccttctagcttccct

SEQ ID NO: 511 - DNA, 120185 bp, Arabidopsis thaliana
aagcttgtgaaagtctctctgcaaatcttgttgctctgttgctacaacaatggcgcagaaacaacagacccttcaccaacaacgaccattctcttcttctcctcgttcttattcttcaatctcaaaccgtcccatctttctccttagccgcaacggtctcctccttgtccttctcgctctcttccttctcctcggtgtattcttaccttggcccggatctcctttgttgctatttccgaacaaagtctcttctccttcttatgcttcttctttgtctccgcatgccaaatctgaatggcgtaactatacccttgctcaggcagctaagtttgtcgccacgaacggcactgtgatcgtctgcgccgtgagctcaccattcttgccttttctcaacaactggttgattagtgtttctagacagaagcatcaagaaaaagtccttgtgatcgctgaggattacattactctgtataaagtcaacgaaaagtggcctggccacgccgttcttattcctccagcgctcgattctaaaaccgcatacagtttcggttcccaggtaaacttttcccctttgagatatctttagctttcagttactgagatctagctggaaatggcttatatactcgcaatgagtagattggctaatgtgacttgcatatattactatagataccattacattttggtcatgggattccttaaccacgccttcatcatacttagatcttggatgttcttgattagctctgagtgattactgggatcataaaattgagtagtctataagatttttgttttgagaagtgtttagtattaaattatgaggttccaacacaaaaccaattgacaatgaatggattggtccatatccttttctatgtggtacactttaagatctttgcccagtttccgatgtgggacattattcccaaatggttgatcctctaataaaataacaaaagatggtcaacctgtggatgtagtagcagtcatttttctttcggatcttgatcaaatccaaatgattatgtatcccctgtttctttgtaatgaaaacatatattttcactaatttactcatcatatccgactagggtttcttcaacttcacagctcgaaggccacaacatctcttgcaaattttggagctaggttacaatgttatgtacaacgatgttgatatggtttggttgcaagatccatttcagtatttggagggaagccatgacgcgtactttacggatgatatgcctcaagtatgtgaattcgtcacccatctttggaaaatttagagtgttttatttatctcttatttccgggttgattttggtgccagataaagcctttgaatcactctcatgatttaccagcgccggatcaaaacggagagacttatatatgtagctgcatgatttacttgcgacccacgaatggtgcaaagcttctaatgaagaaatggagtgaggaacttcagtcccaagcttggtctgagtccatccgttttaaagcaaatgatcagcctgcttttaacttggcacttaacaaaacagcccatcaagttagtttttgtgtcctccacgttccatttcttcaaaatcaacgcatagaatcttcttatatacttatgagttataaatgttggattgtgatcttttgttctgcaggtggatctctacttgctttctcaggtagcttttccaacaggaggattgtatttcaatgatgcggcatgggttaaagagacaaaggggaaacatgtcatagtccacaataactacattatcggttacgataggaaaatgagacggttccaagattatggtctatggctagtcgatgatcatgctctcgagtctccattagggaaattgcagtaaattcgaatggctaaagaaagatagatccattgagtaaattccttagaactttttgggatctttaaaggtatgcgtgagtgttatattacatatgactaattcattatgacttgagttttgttaatccagttgtaatgtttagtagaaacagaggaaaacagggtccagttgtacattttggtcttgagtaaacaaatgagattcaagatgtatgtcttgacgttatatgaacacatgacaagcactacttaaatactacatatgacaagcattcattatcaaacaagcactacttaaatactacatatgacaagcattcattatcaaacaagcacatgactcagacaataactaatctggcttttatttgtttattattcaatgatttagactttaaagaacatcacaaaaacaaagatgcgaagaggtaatagtcataggttttagatggagacttttagattatccagtgataaactcagctttctcataaccatctccattctctctgggatacaaaatgccaaactgtattcaaataacaataaaaattcaacctaactgaaaaaaaaacagagataagtaagattgcaagagataagtaagattgcaaaagttaagataaaaatgccaaactctctttatctaaagaaaaaaaattgagattgcaagattcttagataatgcataaagaaagcaactcataaggaaaatgtacatgtaaagagataagtaaggcttcaaaatggggtttaacgatcaatcttcactttgctcgccaaagccttttgaaactctctatgcagtccagagaacaaaagtatggatctgaggttccaatcttctttaagataatagggggaatgcaatgcgacttacagtgcctgcaaattgggcgagaaatactattattgagcaccacttcatatgatatgttccatagctctattgtgctttttggtatgagccccataaagtctccaagcacacaccatgtatgcaaacttgcccgatgatctttacatgtgtagaaccatgtgtttggattggtttccttttcacaaatgtcacaccaatattttccacttgccttttcaccatagcatagagaaagaggttggtcttcaattctatgctttaccacttgtggaaaagtggcgcaaccaaaatccaagataaacccacaattgtcttcaatgcatctaagcacatgatagctcctctcgttacagccactgcatacttcatcatcctcaggtgaaatgcaatataacggatgatgaggatgacttggatggataaatggctcagaaaatgaaccacaaaggacatctaattttgtatcctcatgctcgtatctaaaaccattgaaaattttgtgacaagcactacacccgaaaatattaacctcgctagtgactaaagcaagccgttcattgtgtagcacatgccatttccttctaggaaatccagcgcaattttggtggaggatgaaatcgcaatccatacagccatagaaggattgaggagagatggggtggttgcatgcattgcaccgcttgttcacctcacacataaggccattaacattgagcctcatgtaatgctctttgtggctgaaatgttgtattgtgttgtcatctattaccacatatggctctatatcttctatttcttcaggtactccttcaagttccttcccattccacacatcttctctagtagcacattttgaatgagcgatataggtcgaacaccgttgacaagaataacccccacaagtccagtccaccttctggcgacaaactccacatacagaattcacaataccaataagagaagttctagaaatacgatgatcatgccgattgatgttaatgaggcgtggaagaccaaaacaatctttgtggatcaagaaatcacattgaaaacatgcgtaagggcttcgatctccattcagcccgcaagcattacatgtaaaaaaaatgagccttgggagaagattgagttgatgatcatgagttttcaaatccaaaacagattttggtggtggatttaaaacacaacgcatatccaaggtaaagttacaagaagagcagtgataaaacaatttatcatcaatctttcttccgcaaagacgacattttccatcagagtagtctggtggttgacccatgaggagcttaagagggtgcaaggagtggtaagagtggtttacctctaaaggatgttttacttcctccgatgaggagtaccttacgcaatccacatggaactttgaatcacattcatgacattcgtaaggaaacccataaccaatcttcccacatttagcatcacaatcaaactcgacccgatctttgagaaggttgagcttgtggctatgcatctcgggaatgtcaataacctctagtggtggatacttggcacagtgtaaatccatgtcgaagtcacagatctcacaacgatagaatagatccccgatgttctttccacataaatcacaactgcgaactactttaagccaatgttggcgctgaagacgagaaagaaaaccaagccgaagagggtgattggaatgaaatggattttcaatgcattcagaggcctcgtcaccacatttcttgtggacgaagaaatcgcaggttgtgcaatagtagccatcactgatagcttccaaacgctcacaacaatcacctctcctcaaatcattacaaggcatcataagatgctcgtggatcaacggtactgacactccatcagagtccatggtcgtataacttgagattgggaagaaaaaagaagaaatgttggatctgaaatctcaaagctccttttcaagtctctttctctctcttttcaaaagtccttgttaatctaaaaaatgctccacttagaagtccttgttaatctcgaagatggtctcacaaaaatcttataatatgttttatatgtacgtgatgacagaagattttttttaaaaataatataactagattagactcgcggacactgcggaactttccatccatatatggatattaagaccaagtccatcgatagtttttagttggtttctaagagaatagtgggcctaaattaaataaaaattcaacaataattgtaggaacgttcctaaaattaggtttttggaaactcattagaaacgcatacgtggctaattgtgatagattgtttggtttaaacaaaaggaaaattttcttgctttctcttttgtttggtttctccgtcgacgataccaaaggcgattcaacttgatttgtttgatccagcgttttgatcatgaaatcgggagagcaaccacatatactcaatatacaaccgccagaatgatgatcgacgatgagattgttcaccaaatcaacttcaaaccggatcttgtggttatattgttgaattctttgtaacaccaggagcttctatcatgtgactatctcatgagttcttaccaagaggtagaatccagctctgtctcaagtatatctcttttaatgcacttggagttttctgaaatttttgctcaaaaaacatggttgtggcaaaacagagcctttatctgacatagagatggcgcttaagaacaagctaataaatgatatgttgtcttaagttttagtttctatctgaatgttgcatgtttggtcagaatgtacttcaccttctagtatttcggctttaagttttagcttctagtatttcggcttttagtatatgtgtaataactttgagactgaatgtttggtctgaatgtttgtgtttggtctgaatgtttagtctgaatgttttctgtttatggattaatgagatgagtatttgtgtttggtgagtatttgtgtttggtgaatgtttggtctcaatgttttcagtttatggattaatgagatgagtatttgtgtttggtctgaatgtttgtagtttacggttttgtttcatctgttaatgtcatgatttgcttcattttgcaggactgggaagaatagaaattgtgccaacatcaattgtggaagataccagattctttaaatgtatgtactgttgtgagttttatcgattaatgagtttggtctgaacttaaccatatccattaatgaatgaatgtatgtgtttggtctgaacttaaccatattgattaatagatgaatgtgtgtgtttggtctgaactcaaccatatcgattaatagatgaatgtgagtgtttggtccgaacttaacaattttggttacaatcgagtaatgagttttatttcatgagtttcatctattaacttatgtacttaaccattttttattttttttaagaaaccctcttaaaaattccaccattgaaccataaaaattataaaaaactctaaactacaaaactatcaaaattaactaataaacaattcgaagaaactcatattaaaaaccaaccaatgtggatgctctaagtaagcataaagaagaactatcacgtgtacagcttaaagtcttaacccgcaaatttctctagcttatcgtggttgattcacttcatcttccctttcacatttgagatatcactgctttaatttcctgaaatctagttgaaaattgccagatttgttaagttttatgaagttctaactcaaaaccaaaataaactgatcaatatgttctttatatattgtttttggtccgatcgcactttaatgggattttttaacaggtttacatcatacttagatcttggatattcattgattagctctgtttgagctgtgtttagtacatgttgaagcaaaagtggtccaatacaaattctgaattaaacttaattttgttaagttgactccacattttatcaatttttttcttgactaacgtgaatttttcgtgtgtgttaaattaccttaattatattgattatcaagtatcaatggtgcaactggtaaaggcaaagtctacaaatcgtctttttggtctcagcagttgatcattgggatagacaacttctgatttattaatggttaatcaaagtatctttttattggaaggtaatggagaagttcacgataggtcttatatgagttttgctagttttgtgtgtaatacttaaagtttaacaaaaaaaattatcgctgttaaatgtcatttagaattttttttagaaaagaaatagaaaaaacttaaaaggtagtacatactctttatgtaagaaataaatattaaatgttataaaacaatttaacaaatggcgtgattatgtgagttataaatttgatattttttgttttcaacaaatttttagtcttgtacattccattttatcaaagaatttaattctacacacttgtttttattgatgatatctaaattctaaataacaattatttagtattaaaaaaaggaaaaacataattcttccatgatgcgttaaaattcttaaaatataatataggtattcaaaaatttattcttataagctcatcattttttccattttttatgtttttatttaacaaatgaaaacactatattatagatgataaatataattttatccaattaaattaatgttaaataaattatatttttattttaaatttcaatgtcccgttttaattagtattattatctataataaatgattttaaaaaataataattcatgctaaatataatgttatcccatcaaattaatgttaaataaattatattattattttaaacttcaattaactttttaatttagtattattagccataataaatgtttttcttaaaaaacattaatgcatacaaaatttaattgaccaacaacacatgtaaaaataaatttgttaattttttttttaattaagggaacaaaatggatatataacttagtatatgcagattttttttttttagaaaatgacagccatcaaaaggcgcgcagccaaaatggatatataacttagtatatgcagatttttttttttttttgcttttttatctctttaagaagaaaaaaaaagttaaacattttctcaacatgtaaacatctgatcgacagacttgacatatgacacaatcttatgaattaaccatattttatataataaaatagaaactattttctttgttacaaacttttcatttatatatttccccacctttgaatctgatccaaacttgtaaaattttctcctcaaattttgttgctctactgctacaacaatggagcagaaacaacatattcttaaacaaagtacattctcttcctctcctagttcttattcttcaatctcagaccgtcccatctctctccttagccgcaacggtctcctccttctccttctcgctctcgtcctgctcctcggtgtactcttgccctggccaggatctcccttattcctgtttccaaatagactttcttcttctttgtcaccgtctccgcagtccaaatggcgcgactatacccttgctcaggcggctaggttcgtggccaagaatggcactgtgatagtctgcgccgtgagctcaccattcttgccttttctcaacaactggttgattagtgtttctagacaaaagcatcaagacaaagtcctcgtgatcgctgaggattacattactctgtataaagtcaacgagaagtggcctggccacgccgttcttattcctccagcgctcgattctaaaaccgcattcagtttcggttcccaggtaaagttttcaccattgagatatctttagctttcagttcatgagatctagctggaaatgagtagattgattcatgttcttgatcatacttagatcgtggatgttcttgactagctctgagtgattactgggatcataagtttgactagtccctaagatttcggtattgagtgtgtttagagtacattcatggttgatcctattaaaaaaaggacaaaaactggtcaacttgtggatatagtagtagctactagtagaggctcaagggtcaaggctaactaaaaatatgtggccttttttttagtttatttatttactttcttttgcatggtttttttcttcatttaagatagctttttattattaaagtgttattgacaattttaacaaaatctgatttttcacatcttaattttttcatcgttttcccaaaaataattttataacatcttttacgtgtcatattagtgtaaatatgtatacatttcttactgtttaggtttgttctttttacgcagttttccaaaagtaaaaaataaagataaaaaaatctaagcataccgtttacttatagtggttagagagtaaaagtaaaattaatttaactataactaaacaaaacaacttttataaaattgtggccttcattttgaaaaaaaaagattggtggtctagggccattgcttttattatttctgtgtgtgaagaaaacttatgttttcactaatttactcatcatatccgactagggtttcttcaatttcacagctcgaaggccgcaacatctcttgcaaattttggagctaggttacaatgttatgtacaacgatgttgatatggtttggttgcaagatccatttctgtatttggagggaagccatgacgcgtatttcaccgatgacatgcctcaagtatgtgaattcttcacacatctttggaaatttagtgtgttttatttatcttattctcgggttaatttttgtgtcagataaagcctttgaatcactctcatgatttaccacatccggatcgaaacggagagacttatatatgtagctgcatgatttacttgcgacctacgaatggtgcaaagcttctaatgaagaaatggagtgaggaacttcaatcccaagcttggtctgaatccatccgttttaaagcaaatgatcagcctgcttttaacttggcacttaacaaaacagctcatcaagtatgtttttgtttccttcatgttctatttctactttatctacttattaatgttggatttatggtttttcttttagtctctttggtaactttgacttgttttgtgatcttttgttctgcaggtggatctctacttgctttctcaagtagctttcccaacaggaggattgtacttcaagaacgaggcatgggttcaagagacaaaggggaaacatgtcatagtccacaataactacattatcggttacgacaggaaaatgaaacgtttccaagattacggtctatggcttgtcgatgatcacgctcttgagtctccattagggaaattagagtaaactcgaatggctaaagaaagatagatccactgagtaaattccttacaattttggggatcttaattgtgaggttatatatgactaattcgttatgatttgagtttggttaatccagttgtaatgtttagtagaaaaaaaagaggaaaacaggggaaattcagagatagtcaaagtttcgcgacagacaaattttggtctgtatgtagtaaacaaatgagactcaagatgtatgtcatgacattatttgaatcacaaagagttgactatacttattacatggaaacaaacagatgcaaaatgacaacatgtcaagcactacttaaataatagtttactcgaataagcacatgactcccaactaattagaccttttatttatttaatggtttatgatttagattttagagaacataagataaaaaaaatcataagctaacactaatttaatgtatcgtatgttcacatagactaaaattaacgtactaatatagacatgttgtcaatactataaccatcatattttagtataccattcgtcagaatccagtaaaaccaaacgttaaacccggagttgaccaaaaaaattcaaaaatatttaataaaattaattgtgataaaaatataatattaaagaaaattacatcaaaacctgctctgtttgattctcggttttgtttccggtttaatctggttatggcgttgatttgaatttgatgggaggcactaggcagttagccttagtttggtttattggtattcgaattcaaattggaattgagtactaaaatgctctgttactcatttctgcatctcgagttgttatggattaggttacgaaatgttcaatttcgtttggtctagttcggttcgtttcgtttggtctagttcggaaaccctattcaagattgtgatcatcacgagaagcttgtgcatccttggaaaggtacacacacttttaacttttaaggttcttacttttcttcttaagattgaattgcaatgtgtgtttagtgattgtgtatacgtggctgaaacaggcattgttgttaatattccaactacaaaggcacaagatggtcgacccgcgggtgagagtggatcgaagctaagggatgagtatattctcagaggattaaacaatggtcttttgtttgacaaggcttatagagtagatggtcatggaaagaaggactggatgaaaaaagacggtcccaagttaggtctttacgggtggatagctggtgctgatgattataacggtaataatatcatcggagaaaacttgaggaagaccgtgaactcaaaactatagctgagcttacgaaagaagaggcgaggaaacagcaaatgcttgtgaagaatctgagacaagttgtagaagagaagataaaagacgtgaaggagattgaggagctttgttcagtgaagtcagaggaacttaatcagttgatggaagagaaggagaagaatcagcaaagctgaatgctatacaagagagaacaatgaggcatattcaaaagatagttgatgaccatgagagattgacgaagctgttggagtcagagaagaagaaactcgaaatcaaaggtaatgagttggcaaagccccaagtgcacaatggaaccgagagaatgaaattgtctgaagatcttgaacaggtaaaacatttactctctgtatctctcttttttgttaagatataagtccatgtgttgatgtgtacttaacagaggcaaaaggaggagcttcatgagaaaatcataagactagaaagacagatagatcaggtacaagcgattgagctagaggttgagcagttgaaaggacagctcaatgtgatgaagcacatggcatcagatggcgatgctcaagttgtgaaagaggtggacatcatcttcaaagacttagttgagaaggaagcagaactcgcagacctcaataaatttaaccaaactcttatccttagagagcgcaggaccaatgatgagcttcaagaagctcgtaaagaattggtaaatgtatgtatcaaagtgttgttcttttcaattatatcagaaaacctctgagaaagcttgacattttggtttgtttgtttcatgtgccttatgtagattatgagagaatagaaaacaagtatcggtgttaagtgtatgggagagctcgtaaggaaaccattcgtggatgcaatgcagcagaagtattgtcaggaagatgtggaggaccgagcagttgaagttctccaactttgggaacactatatcaacgatccagattggcatccatacaagcgggtcaagctcgaaaatcaagatagagaagtggtaagaccgccttcttgacacggtttgttatgtcgaatctctctgaaagattaaaaagctgtttttgtgttgttgttgttatttgtgtttaggaagtgatagatgatagagacgaaaagctgagggagctaaaggcagatttgggagatggtccttacaatgcggtcacgaaagctttgttggagataaacgagtataacccgagtggaaggtacattacaacagagctatggaacttcaaagaagataagagggctacacttgaagaaggtgtcacttgtttacttgatcaatgggaaaaagcgaaacgtaagcgcggaatggcgtaaaggtttaaaccttttcttgataaccgaacaaaaatatgttttcatgtgcaaaatataattttgctcatactggatttttgattgatgatttgcagctgcaagagggactgaagaaaaagcttagttgcagagaaatgtgtttggtttttggtttattctttttgtttttcttctcagaacttagtgaatagttgacacaactttgatgtcttgcatcgttttgatgtttcattgtgaaatatttctaggagtatgccgcctctttggacaatgagtagtaaaatgtatcataatgccattttgtaatatatttaacatgtaaaacaactagatgtggcctctctcttgtctcatatcttaagcatgtcatttagaaccttttattgtaaaaaacaaactttgtcacgagttactttcttttcttctagtcaaaaaattgaatattgaccctttcattgttatgttaacgtttcatcttataacctataaatttacattcgttttgggccttttggctaattacgagatagacccttgtcaatgtggaaaaaaaaaaaaaaaacttcgaactgggtagttttgtcgaacagttggtgtccatcactagaacaccgatcaccgatgagaggcgtcacacccataaaccctcagaagaagatagaagctgattcgaatcccgtcaaagaatctgagtaagcttacctaattcttcctatagaaaccaattcaatactctctctttctctctaagtctgtttccaaagagtttctaaggatttcgatttctccggttcgtcttgtagttactatgaaggcgaacgtcttactcatctactcgacttgattcagaggtaaactctctccaaacccttaaaaaaaaaccatcacaaatatcggtttttgttacaaaagttctctctttttggtgaattagaggaattgagacgtccaagctttcgaatgtgaactcattacctgagaagatatggctcaaggttactacttactactcttgctatggtttttttttgtttcttcaagattcgattctcaaacaccaccgttgtgatgtatttcagaagcaaatagcgattgggatcaacgaagtcactcgagttcttgagaggatgaatcccaacaatactagtgaccaacaacaaaaccctaaacaacttcaggtacgacactacaaccctaataactctcattagaaaaatggtattgatttagaaagagactgttttcaattcatcacaggtagtgattttagtagcagattgtaaaccgaggatgctgaccaagcatatacccaacttagctgcttcgagaaacgttccggttctctatgtaagggacaacaaacgagcctctctcagattaggtgagttggttaagctcaagacggctctagccatcggtatcaaggctagaggaaatgatctcaacctactacttaaacagattcttccgagagattcttgatcctgtaagagaaggaagttttctttgatctggttttgatgtgatcctttctcaatgtactagtagtagtatatacagataaatgagattgacaacaaatttagtgattccagctttctcgaatgtattcaccgagcttttttcccaaaaacgaattcccgctcttgtacccaaaaagattttaccgtttaccgctcttaggcgcttgcaattgaggatggctcatctgtgacaccaacttgtttaggcttctcactagcattatctacttgtttgctcggtttcccgttctgagacttcttctcttcgtccttctttacccgcactggttgaaactgccacaaaaaaaaaagaatcaaaacttgaatgagtaaattattgtgtgaagtgaagcagaggttttgatttaatgaagaacctgatatatggagtatatcacatttcttcgtatttgagccatcatttccagaaatagattgtatccttcgagcttatactcgatgagtggatcgcgttgcgcatatcctctgagccccacagcttgttgcacgaacttgagtgcttgaaggtgttctttccataacctatcaatattgctcaagattaagaatcgttcggcatctttcattagccctggtgattgtttctccacgatttcctatgaatcataaacaagctttattaaccacacagctcctggtatcttataccaatgtgaaaaggctaagaatccatctataacttactcttttctgtaagtatgcatcgcggccacgggcacggagataatcttgcaacccttcataacttgatccttcgcttttcagcaaatcgggagtgagatcgttcaacaggtaacagtacctaagaggttgaatttttatgagagcttaaacaaatgtatagtgcttatgtatgtgaaatgttttcctaaagaagtataattcttactgctgaactttcgcaatgagcttttcaaaatcccagctttcctttggagtatctgggccaatatttgcctagtaatggtaaaacgagtttcaactgttggtatacaaagactcggggggaataacgaccttctttagctgggcatcaatatcaaacggcttacctctagaatgtcatccattgtcaattcagcatactcgataatcagaggctcaaggctgtccgacacaagagcacgccttctctctgtataaacacgatctctttggctattgagaacctcgtcaaattcgaataattgctttctgatgtcaaagaagtaattctcaacttttctctgagcttcatctagagctttagtaagcatcttggattcgatcggtaaatcttccaccctgaatgccctcatcataccctaagagttatacggcaactatgtttagacgattattttccagaagaatcaataaattgtagatacaaatgtcacctgaatccgatctccaccaaaaatgcggaatatgttatcttcaagactaaggaagaatcgggaacttccaggatccccttgccggccacttcgcccacgcaactgtatgaggggaacaaaacatagtgaagaagatttatttcactgagaaaggaacctgaatcaaccataaatctccttgaaacaaatctattaaggaaacctgattgtctattcgacgtgattcatgccgctctgtccccaccacgtgaagtccaccagcttccaccacctgcagcagttcaggagaataaacgatcaacaacagacacttgacagagattcacatactgctctgctgtaacagaactaaccttcttcctttcttcatcagtgtagcccttatattctttcgctatcgccagaaatgcagtcctcagtttacctataacttcatcttggacaggaccctgagaaaaggaggaaagaaatgactcaaactaaaatttaacatatgaacatatacttccaggatttctcagttgctcaccttttcacaagaataagataaacgttcctctgcttcaagctcagttaacgatttctggccccaagcctctacagctgattgtacagcttcttcagctagctttgctttctcatttgacagtttgcatggaaataacttctcattcacctgaatcgttaaaaaaattctacttagctcagtgtaaccattagaatctcatgtttaccaaaaccagagactctagaaaggccaaaccttccatgttctcttgggaggggccttcttcacagatacaaaaacaccatcagtaggctttaccactctgtggtaacatttaaaacgtaacaaaacttcagctaaaaataaatcatgaactccaaggttctttgttacacaaagtacataacctgtagcaattttatcaatggtggataaaggatctttcttatgtggacaaaatgtttattagcgataataaagtattattcataactttgaatgcttcatgcatgatacctgggcataagtatctcacgaagcttcaaacgtgccatgaactctgcgtttccaccaagaattatgtctgtcccacgccctgccatatttgtggcaattgttactgcccctaaacggccactttgtgctacaatttcagcttccctctccacattttctggcttggcattgaggacctttttgtacaacatatatataacatcatctgtcagtattcttgtacaaggaatataattgatttgatttttttattggtttgtctttacatacaccatttgtttagatgtcaaaaaaaaaaagtttgaactaatactaatggagcatatgtatcttggattcatttttgcatagattacgcgtccaagatttattaatcaaaatgacatgaaagccttacctcatgagttattccagcttccctcaacagttgcgatagttcatcactctgctcgacactggttgtgccaactagcacagccctacctgtcttgtgcattctagagatctccactactactgcccgccatttgccattgactgccttgaaaaccacatctgactcatcctgaaagtgatttaaaaaggtataagacagggaaagagagacgttttttttttgaaaagaaaatatcaaaatcggaaactagtacagcatacaatgtccttccagaactaacatggatgtttaacatttttccactttaacagatctcactagaaggccaacatacacgaattttagatcttccgatggagaacaattgtgaagaccaacagtctgaattttgaggtacaagttcagagcataagataggagacaaacctttcttatcatgggcttatttgtgggtacaattgtaactttaagcttgtatatgctttcaaattctgcactctcggtcgatgctgtacccgtcatcccgcaaagtttcggaaactacaacataaaagatattatacattacaatgcaaacaataatcaaaaagtggaaagtatgcatttccaacctgcagaaagaagttttgataactaattgacgccagagtaatagattcattctgaataggcaagccttcttttgcttcaacagcttgatgtagtccatcactccaacgtcttccctgaaagaaataacttattcagtgggttcctacgtactgtttttttttaatctatgttgttcttgtggcctaagaatatttatcagcagtagccactgagatcactaaaatgataaatagtgatatttcttattaagatgaatatacacaagtacctgcattacacgaccagtaaactcatccacgataagaacctcctttgctcggatgatatagttcacatctctgagaaaaagttcttttgccttaatggcattaagaacatatgatgcccactgttcacggggatcatacaaatctttcacgtccaggatttcttctgcatcctcataaccctgttccgtcagtaaaacagtcttctgcttttcatcaacctgccacaccaaaaaaccttagtgaccagttagaatttggaagatggattgccaactccactataaaatttcacacaacaaaagaaataactgaggattcttacagtgtaatgtatatcccgctcaaaggctgaagcaatctttgcagctttgtaatattggtcactaggtttctctgcaggcccagagataatgagaggagtccttgcttcatcaataagtatggaatcaacttcatcaatcacacaataattgaaatccctcaagacgagctcctcaacactctgtacaatcagaaactaactcagaaaaaacatccaaaataaactcatacaatcaataatgaaaggagaaaataaagcaagaattactttccgtggctagattgtctctcagataatcaaatccaagctcactgttggtgacatatgtgatatcgcataaataattttcctttctttgttcaggtgtcatattctctgtcaaagtaaccacatgcgtaaagcatctataacacacaacgagcaaagaagatgctgattacattgacaaagaagttcagagaaaagagacatacgttggattagaccaaccttcaatccaaggaaccgaggaacttgaccaacccattcacaatctcttcgagcaagataatcattaactgtaaccacatgaacacctttcccacttaatgcattcaaataagctggtaaaatagcaacaagcgttttcccttcaccagttctcatttcagctatttctcctttatgaagaaccataccacctgcaattaaaaccatatagagagactccactcaaaaaagtctttcataacagtgagaccattagaataacattccacagagactgtgttaccaattaattgcacatcgaaaggtctgagtccaagaactctcttggaagcttctctcacaacagcaaatgcttcctacaatttgaaatttccacaattgaatcaaaaacattggtgtcaaaaccaaaaactgaaggatttggaaaattacaggtaaaagtgaatccatggattctcctttctgagcacgttgcttcaacgcatcagtcctctctcgcaactcagaatccgaaagagccgaaatctcagtctccaagcgattaacggatgcgacgatggatgcgtactgttgcctagtcgactctccgttatcagaacccttgaaaattccgctaagaagaccacctagtgaagcattcacactcgtgcttctcttccgagagcagctactacatccagatactcccaacttgacggtgtttccgaatttggtgccccaaaacgacgaagagctcagaagacgattttgccggaggatgattccatccgcgatcacgaactgagaagcggtaggtgagatcgaggggcggtggtaaagtaactgagagtcgcagagtggagacaccatcatcgtcgacggcgagccgggagaatttccggcgggagcgaaaaacagtccggctgaagaaaacccgaaaacttttatttccggttttcgtgtgtcgtcgagtgaagagcacgagagagagaattgagacgttggggataaggtgatgttaattacgtttatacccctagactcaacttctggtggatactcttcttttttgccacgtcattgagtttcttacatattttctagctttaacttatttcacgaattattttatatattcggcatgtatgtgcctatgataatgcagattttaaaaatttaggtgaccgattgatttgtaccatcaaataacttggattcaaaccaaaaaggctaagcatggatggtaaaaatagacacggcattacatcgactgtaaaatggtaaaaagaaaaatcacggtcatcatctctacacattattttgcttgtaacggacagagtatataattcacttgagagaactggagatcatataaagagaatcctaaaaacaaaagactcacagagaacaaaaaaaatgttctgacagtaaaaggcggaaaaaaaacgatgaagcaagaataaaatgtatgactacctgggctcaggaggcactactttcaaactcctcatccattcgcagaaactggcttcatcaaactctataaaactactctttagtttcattctttgctctgtcgtcaatgttcttatctgtggaaatcttgcttcctgcacaaaaaaattgggttcagaagaaaaaaaataaaaataaatggattaagatccgcaatgatagttttgtcttttctttctgacatggtttagtatgtttttacctgctcataaggagggtctttatgtgctggtataagccggcaaacaaaatatctagcttgggaacttccttcctgttatgtttcaatatatacaagattttgaattatgtttcaatggattagcagatagatattgaatccataaaaaaagaaaggttagaaagtgtgtgattcttttgagaaaaattgtataaggttctgaaatgttaaggaccttgaatgcgagaatacgtggagctggaaaccggaattcagttagctcttcagctaacgttctgcaagctgctaagactgcagcactcttcacctcgtcagctgacagttcggctccctaaatcaaccaaaatgaatgattaaactgaagtgatccgaaaataattaagacacagaatgaagacaagagtaacttaccaaccaaataaatacatctgtgccatggtcaagaataacagccttatctgattgcatagagagatcatacgctggtagttcctcgaatgtaccaccttcttggtgcatcaagcaacggggtgctaccatacgaagagacagatcgaaagatgcgtttagaaacaaatttcgtagcaccgatctttcatcttcatgaccaatgatgtttcccagtaaaggaccccttctaagatggaagaggagttctgggagggatgatagttccttagggaagctataaagctttgattttggcacttgtgatccgaatttcaaagcaatgtctttgattctttcgtctactgtagcacgcatatcgactgcgtccttctgatttttcgctaataaaagagttctcttggagatgaggaccgcagaagcttcgtcctcaacactctgaagatatgctgagatgctatcaacagttggcaatttgaacgtaattacccgagacacatctgcttgataaacatccgaataatggaaagcaaactggaaaaatacatgatcgcttttgatgtccctcttattctccattgagagagagaagctttgtgtttcttcaacactcagcatctgaatagagagagccgcatcactcttaaacgtctcgtgagtttctgaatgtgcttcttcgccaggtccaatcacctgagttataagaatatcatctgaacatcgtacttcaagcagaccatgtgaacctgctgccctagtggctgccctctgcaagtccacaccaaaggcttcaccaaaatcatcgtgaagaaccaaaacaccacctgaagcttttgcaagtggctgcaggataggaactctgagagggcaagttccagcgcacaatatgtcgacgaccgtattgtgcctgtgagcttcacgccccaaattttccatccattttatggctgtcttttccatatatggataatttggatgactcattgaatgaggtaccgatccaggaccatatgtaatgggaccaccagcgcaaactatgattctactgttacctcctgctcttctgaccactccccgagacatttcggctgatggtccttggattatagccagagcagcctcaacggcagttccaaggcacctatctctagaggcttcaggtacattcaatgtgtatggtcttaaggacgagaatatctcatgcgctacctttagtgatgcatgcattggtgacaagtatacaccggtcccataaatcagcgctttcatcgactctgcagatggtgattttgcaccagaaataacatccgcagaagcaacggaatcttcagagaaatcatatattgaaacagtacgaccatacagtataatcccaagcctggtagtttgtggaagcgagtctacaaatgcatgcaaagagctctgcaagtgctgaagatgtggttcatctaaacactcatcaataacaaggacgacaggtgcagatgtccgcgaatcagaggcaggaacaaacccaggtctcttgtttccagtctgtacataatcaaccagaggcaatgaaagctctggaaagttttgcaactcattcttgctcgaagccacatattcacctttacttccattcatgttctcgcagatgacacactgccattggcctgagccaattaatatggagctatagggatttgaatatgctccacagttcaaacagcgatgtggatcacgttggataatctgaggaccaggactaatctccctcccagcagaaactattgctccaaaccccaagctagcaacatttgctagcttcttctgctttaaaacctacatgaaacggccagtgatggttgcagataaataaattacacaattagctaacactgacgcacaccaaatgtgaattgaaagttaagtaaaataccttatttgctgaaaacaaaacataaggtgagtctgcagctattggttcttccattctaacaacatctggaagatcacgctgagatccaacagatgacccgtttgagtaaaaggaaggtgtagatacgggcagagaagaattagctgaagagtatgccataggctgaggagtagctggagaggtacggaaaggcacagcagctggtttaaccggagtattaaagacaggaggaccaggcggagtactcaagcgaggaatgggacttccggttctgataccattcgcaggtgacaacaaacttggggatttcatcgacggtgaagacatctgatctggtctaaaacttggttgaggaaacctaggaggtataggtgaagctactactggaggagaatgagggaccggggttctatctggctgtggtgatggcctatttggctctagaggagtgagagttcccgggtaattaaccgacgatttcggtaagttagccatcggattccgaagtttctacttaatccaaacaaagtaagatcacaattcacaagctgaaacagccttgaactgtgtccagatcaagaatctgcagagaatttcaacaaacaatccttagtccttagtatcccctaaaattcagctcaaaatatcaaaaaacaaagttcatagaaaaaaaaaacaggacaattccgaagttatacttctaaacgatactaaacccaaaatcaccaattcgttttcgtttcaatcaccgacaaatcaaaatccgcagaagtgtatatcaactaaaatctacccaaagtagacataaaaacaaaaggcaaaatcttaaaatcaagcagagaagttagggtatgaaaacagaaatctgaagaagaagaagaagcaggaataaaaattgtgataccttaatcggagagacgattcgagaaattaggaagaagaagaagaagcaaattcgtagacgaatttttgactcgcattgaatcgtagcttacgatccctctcacccagtactactcctctcgattctattttcattttttcattttcttttaactcgatgcgtggcattttcgttaatatttacacttaagctacaactattggtcatttcactaaccacgcgtgccttgctggcatgatcgtaatatctcattggttataaaatcaactgccagcacactgcatgacgtggtattaaccgacgtcgcatttcagattctctccaaagccgaaataagtaacgtaacggttaaattcgggagaaacgacgtcgttaacaataaaccttgtggttaaagaccaattttcttttggtaacttccttttttgtcaaagcttttacataattagaaacaatgttagtataaaaaaataccttaagctcaaaatatattttgagaggacttaggaaaacaattgtttgtcaactagaagcactaatgtgaagttgaacaagcgaagcataaacaccaccttcgatattgatcaacgtttcgtgcgtccctttctctacgatcacaccgttcttgaccacggctatgacgtcagcattcttgatcgtggaaagcctgtgagccactactactgtggtccggttcaccatcactcggtcaagcgcgtcttgaaccacccgctccgattctgcgtccaacgcgctcgttgcttcgtcgagtaacagaatcttcggttctttcacgatggcgcgtgcaattgccacgcgttgcttctgtcctcctgacaattgtatccctctttctcccaccaccgtatcataaccctaaattgaaataagaaagagtttttttgcttgcatagtaagtaatctctctgtttttcaaaagtgaataaaagtcttgttgtacttgtagtttacctgttgtatactagatatgaacccgtgggcattagcaagctctgcggcagctatgatctcagcctcggatgcttcatcaccgccttttccgtaggcaatgttggatcttattgtgtcgttgaacagtacaggctcttgccctacaagccccatttgttgtctcacccattttagttgcagcttcttgagctcaactctgtctagagttatatgacccgaatccggatcataaaacctttgtaacagagaaatcactgtagatttacctgatccactctctccgaccaaagcaaccgtctgaaataagcaagagaattaaaggactaaacatgtatatcaaaatcagaattggtaagtttcatgtctcctcactttatttgtgtcaatatgtaagggaaatatcaagataaccaaaaaaacaaatgatagtagtcttttggacatgttacctgtccagcacgaatggcgaaacataggtcacgaaagatttgaacgtcaggtctagtttggtaggtgaagcttatgtgacaaagctcgatatctcctttaacattctctaacacgagtcccgattcatctctcgaatctatcatcgatttcccatcaataatcccgaaaatggaagcagcagcaccctttgctttactcgaatcaggagcaaaagagctagcttgagatatcccaatcgctgtcatggttaacgccaagaaaacctgcaaaagatcattagttttcttcgtcccaagatttcattacaaagattcccaagaagaagaaaaaacctgaaaaacatcgttgaagtttgtccttccggctttaaccagtctagctcccacgtagaaacaactagcgtagacagagtaaagaacgaaaaaggagataccaaaccctactccgctgattaaaccttgcttaatcccagatttaatcgtatcttcacatcgcttcttatacatctccatcactttctcctctgcacaaaaagacgcaacagttcttatactccccaccgcgtcattcgccacctgactcgcctcctcgtactttgcctgcaaacatttttttctttcaaaactattttaagtttcttcttcaacaagtaagccttaaacccttgaaaactcattccacaataaaaaaatgaaaacaggaatgtgcgaccaacctttgcgtctgcagtgaagcctttaatgaacttaatttgaagataaccattgattccaattaaaggaatcattactaagataataaccgccaatttccaactcgctgtgaaagctataatcagaccggagactgcggctgcagcgttcttaacagataaagacagcgagtcgcccacaagagtcttgatcaaggctgcatcagcagagagccttgatcctatggtgccactcgagttctcaggatcatcgaaccacccaacctccatgtgaacaactttctcaaaacacattactcttatcctctgaattaatctccctccagctacagcaaacaagtaggtatgcattggatacactatcaaagaagctacaccaagaagcacgaatatcattgaccagaatcttgaatctctcttcatatcgtgaggcggtttgaagaaagcttcgattacttttgcaaagaggataccaaaaatcgggaatatagtgccgttcactgcacctaataaggttccaagtataagaatggtagtctccggcttgtttagagcagcgattcgggttatcgacacatttcggctttgttctcgagaaatttcagtattttcttggcgtccaagtaaaccaagaacggaaacagagtcatcatcatgcaccctcgttctgatgtttctagatgatccacggttgattgatctgtctcgcaattcatttgaactctccaatctcttcggttctttttttatcttttgtaaccgtataagttgtgcataagccccttcatggtccttgagtagctccgagtgtgaacctattagatgagtacaaaaaattaaatttttgcagttgagtcaaacccctaaccaaaatgcagaaatgttacttaccttcttccactatcttgccgcggtgaatcacagcaatcatatcagcatttctcactgtgcttaaccgatgtgcaacaatcacagtagtccggctcatcattaccctatctaaagcctcttggactaccctttcagattccgcatcaagtgcgctcgtcgcttcatctaacagcaagatcctcggatctttaagtatcgccctcgctatagcaatcctctgtttctgtcctcctgagagttgagttccatgttcccctaccaatgtctctaaacctcgaggcaacttatcgatgaaattagccgcgtttgctagctttgccgctgcttgaatctcttcaactgttgcgttctcttttccgtagccgatattctccattatacttgaagaaaacagaacaggttcttgactaaccaatccaatctttcccctaatccatttcaactgaaactcctttaagttaacaccatcaataagcacactgccggaacttggatcataaaatctttctatcaaactgatcacagaagatttcccactcccgctttcccctaccagagcagcggttgcaccactcggaatcaacagcgagaatccgccaaaaacctcttccataggtctcgcagggtaactaaaacacacatctcgcagctcgatttcgcctcggatatcttctaagaccttaccatttagatcaaaagcatcaatcgacggctttctttcgatcgtttcaaacatcttataagctgcagctttaccagccgcaaatgcggttagacaaggtgttgtttgccctaaagacctataaaaagagaaaaccacagtttttaaaccgttttaactgtgttgagactacagagaataatatgaatatattactcacatcgaacttgcgaccacagtgaccattacattaaccacttccccacctgtatacccttttttaagtatcatttctccaccaaaccatatagctaaagcatagctgcaaaagaacacaaaaaacactactccaagacctaaccccatagagaaaccttgcttaacactcgctcgataggctaaatttataaattctctgtagcttttcatcgcttgcttctctcccgtgaaagaagcaacctgaagaaaaaaacacaataacttggttaacatcaaccttgcaaaagggaaaagaaagcattcttacggttcgaatagaccccaaagtttgttcaacaacagtcgatgcttttgcataagcagcttgttcacgagaagaagctctagtaactataatcggcatagctgcaccagctatagctagaagaggaattgaaactaacataacaagtgtaagtaaccatcctttcacaaacgctaaaacaaatccacccacaaatgttgcaatcaactggataaacttcccaacctgcagaaaattttcaaatctttagtaacttcagtctactcattttattttattttttgctgttttcgtttgtttaccttctcacccatagcttctagtataagaacagtatcaccggacattcgaccaacaacttctccggtgctcgtttcgacatcgaagaatccaatgtcttgtcttagaatcgttttcagatacaaactccttatccttgcagcttgtctttccccagtaatcatccaacaagccacctctataaccaaaaaagaatttaaaaaaaaaaaatcaaaattgtttttcttacaaaacagaactaaagttaacttattacttacgaagaaatgctgctcctagtgtcccaagtccaaggtagacaaatttcaaacagacctaaacatgttaaagtaaacataagattgtttctttttttgagttttttttcttcttttgattaactcattttttgggttctatcctaaccttggagactatctcaacaatgtctttgttgctctggttctgaccaatagaatcaatgagatcaccaaacaataatgtcattaaaggaaaaccaacaccgtttcctatagctccgatcgaaccaacgatcatcaacaacacatcggtagaatctgagaaggaaaacaatttgtagaacggtacggtctttgtcttttcttccatttctatcttttttgttttccttttttctaactacaaacatgattgattcatttcttatgtctctttcatttgatattttcttaaaatgattctatttaatgtttaatggcccaattgaagtgatctatattattttaagaacaaaactgatcattagttataaaatatgaaaatatcgtcagtcttgtgtcgtcgtgtatgccaccattattccttattgtattatgttaatagtgtgtttaagcattgaacaagccggagttctcgtccctttttagattatcacatgtgatatgtgaaaaatgacagttgcgtagctaaaaagcaatgactaataacaataaatgtttgcgtcaattagaagcattgatgtggagttgaacgagcgaggcataaactccaccttcgatattgatcaacgtctcgtgcgtccctttctctgcaatcacaccgttcttgacgacggcgatgacgtcagcattcttgatcgttgaaagcctgtgagccaccacgatggtggtccggttcaccatcacccgatcaagcgcgtcttgaaccacccgctccgattctgcgtccaacgcgctcgtcgcttcgtcgagtaacagaatcttcggttctttcacgatggcgcgtgcaatcgccacgcgctgcttctgtcctcctgacaattgtatccctctctctcccaccaccgtatcataaccctaaattgaaataagaaagattattttgcttgcgtagtaagtaatctctctgtttttcaaaagtgaataaaagtcttgttttgattaccttttgtatactagagatgaacctgtgggcattagctagctcggaagcagctataatctcagcctcggttgcttcctcgccgccttttccataagcaatgttggctcgtatcgtgtcgttgaatagtacaggctcttgtcctacaagccccatctgttgtcttagccattttagtcgcagcttcttgagctcaactccgtctagagttatatgacctgaatccggatcataaaacctctgtaacagtgaaatcaccgtagattttcctgacccactttctccaaccaaagcaacagtctggaaacaacataagaaataaagaagtgtgcatataattaaagcccaaatcagttcaaaatcgtaccaaatatattgaaatctataacaaaatagtataaaatcggcagagttctaaaaatgtttttttggagcttctacgcaaacacacacgacttcatgtaaaaatgttggagatggttacctgtccggcacgaatgctcaaacagaggtcacgaaagacttgaacatcaggtctagtttggtaagtgaagcttatgtggcaaagctcgatatctccttttacattctccaacaccattcccgattcgtctctcgaatctatcttcgatatcctatcaataattctgaaaatcgaaacagcagcacccttacctttactcgaatcaggagcaaaagagctcgcctgagaaatcccaactgctgttaacgtcaaggccaagaaaacctgcacaaaaatcattaactacagtatgttctcctcaagatccattacagagatttccaagaaaataaacctgaaaaacatcgttgaagtttgtccttccggctttaaccagtctagctcccacgtagaaacaactagcgtagacagagtaaagaacgaaaaaggagataccaaaccctactccgctgattaaaccttgcttaatcccagatttaatcgtatcttcacatcgtttcttatacatctccatcactttttcctccgcacagaaagacgcaaccgttcttatactccccactgcatcgttcgccacctgactcgcctcctcgtactttgcctgcaaacatcattttttataatattttaagttacttctgtaacgagtaacaaaccctaaccctagaaaactcattttttttaaagtaggcatgttcagttctgataaactttcgagttagggcaacataaattacccatttaggtcaagataatacttatgttggtaaggatacgttttcgtacagatacatttgagacaataatttttagtactcagttcgtagaggaccaacctttgcgtctgcactgaagcctttcatgaacttaatttgaatatatccattgattccaataaacggaataattactaagatgataatcgccacttcccagctcgccgtgaaagctatgattagtcctgtcaccaaagacgcaacgtttttaaccgatagacaaagcgagtctcccacaagagtccggatcaaggctgcatcagcagagagcctcgctcccattgcaccgctcgagttcccaggttcatcgaaccacccaacctccatgtgaacaactttctcaaaacacattgatcttatcctccgaataagtctccctccagctatagcaaacaagtagttagtcgttggatacactatcacagcggctacaccaagaagtacgaatatcatcgaccagaatcttgaatctctcttcagctcatgaggcgctttgaagaaagcttcgattactttggcaaagaggataccaaagatggggaatatagtgccgttcacagcacctactagggttccaagtataagaattggaatctctggtttgtttagagcagcgattcgagtaaacgacactttctgtgatagttcttgagacattttagtactatcttggcctgcaagtaaacccagaacagaaaaagagtcatcatcttgccttgtgctgttgtttcctcttgatgatccactgctgattgatccatcagaaatctccaatcgctttgattctttgtttatctcttgtaaccttagaagctgtgaataagccccttcatgatctttaagtaactctgaatgcgaacctgttaacaaaaaaaatattagagaattagaaattttcgcagctgaatcaaaaggtttatgttatttaccttcttccacaatctttccacgatgaatcacagcgatgatatcagcgtttctaaccgtgcttaaccgatgcgcgacaatcactgtagtccggttcaccattatcctatctaaagcctcttgaaccactctttcggattccgcatcaagtgcgcttgtcgcttcatctaacagcaagatccgcggatctttaagtatcgccctcgcgatagcaatcctctgtttctgtcctcctgagagttgagttccatgctcccctaccaatgtctctaaacctagaggcaacttatcgatgaatttagccgcgtttgctagcttcgacgctgcttgtatctcttcaaccgttgccccctctttcccgtatccgatattctccattatacttgaagaaaacagaacaggttcttgactaaccaatccaatctttcccctaatccatttcaactgaaactcctttaaatcaacaccatcaataagcacttgtccggaattcggatcataaaacctttcgatcaaactgatcacagtagacttcccactcccgctttctcctaccaaagcagtggttgtgccactcggaatcaacagagagaatccgccaaaaacctcttctttaggccttgcagggtaactaaaacacacatctctcagctcgatttcgcctcgaatatcttctaaaaccttcccatttaggtcaaaagtatcaatcaaaggctctctttcgattgtttcaaacatcttataagctgcagctttaccagccgtaaatgcagttagacaaggtgatgcttgccctaaagctctgtacaaggaaaataaaatagattaatcacaaaataaccgtttcaaactgtcttaagacctagagaaaaaatatataatatactcacatcgaactcgagaccacagtgaccataacattgatcactgcaccacctgtatacccttttctcagtatcatttcaccaccaaaccatgtacccaaagcataggtggaaaagaacaccaagaacattactccaagacctaaacccgtaacgaaaccttgcttaacattcgatttataggccaaatttatcaactctttgtagctactcatcgcttgcttctctcccgtgaaagaagcaacctagataaaacacacaaacacttggttatagttttatgttagaaagtttagtataaacgctacacaaaacagaaaagggaataggaagcatttttacggttcgaatggaccccaaagtttgttcaacaacatttgatgcttttgcataagcagcttgttcttgagaagaagctcttgtaactataatcgctatagctgcaccagacatagctagaagaggaattgaggtcaacataacaagtgtaagtaaccatcctctcaaaaacgctataacaaatccacccacaaatgttgaaatcaactgtataaacttcccaacctgcgagaaattttcaaaactttataatcatcaatctattataaaaaccttttttttttgtctcagttttcgtttgtttaccttctcacccatagcatcaagtataagaaccgtatcaccagacattcgaccaacaacttctcctgtggtcatttcgacatcgaagaatccaatgtcttgtcttagaatcgttttcagatacaaactccttatccttgcagcttgtctctccccagtaatcatccaacaagccacctctataaccaaaaaaacgaaaaattgtttttctccatttgataaaaaaaaaaaagaactaaaaaaatgtatcttacgaagaaaggcagctcctagggctccaagtccaaggtagactaaactcaaacaaacctaaacataataaagtaaaacatcaaatagcaactcaaaatattgttttgttttttaggttctaattagtaacacattttcttaccttggaaactctctcaacaatctcttcattgttctggtttggacccattgcatcaatgagttcaccaaacaataatgtcattaacggagaacaaacaccgtttgcgatagctccgatcgaaccaacgatcatcaacaacacatcggtagaatctgagaagaaaaacaatttgtagaacggtactgtctttgtgttcgcttccaagttccccttcttcatctccttatgtgttggaatgtttgaatgaacgaccattgaaaaatgactcaccaagtattatcaatgaaacaaagtcaaatcattgaaagatatgggatcatataaacaggtgaaatatgggttcattaaaacattgaaagatagtttaatttgtttataaatacaaaatcaagaaggacatcgtgggatatcagataaatagtattttaaagatgctgttattaggtgtgacataaacaaaaatttaagaggcgcaacagtgggatgttttattggtttttttggctaacaacaaacacgattttgatagttcatcatgattttgatgtaattgttttttttgtttgtttattttatggtatatatgtaatgttgattaataatgaccataatgtttaacatgatttgtatttttaagtagaaaactccttacaaaaaatatgaaagtatcatcagtgtttgtgtcatgggctctactaatttccattgtcctcaactcggtcgtgtattccatgatcctcgaatcccttctttttgttttgtcatcggaaatttttaataatgaaatttgtcgtggaaccacgaaaaattataacgtccaaataagaaaaatttaaatcgtggacaaaaaaaaaaattccaaaaacacagccggaagaaaagtgattttcttggaatctagattctatggaagggatgcaaattaagacactataaattaatacgaagcataaacttttaaatcgaactacaaaaccttaaactaagaacaaaagaaaccagacttcatcatcatacattcataccctctagactcaaagaaagcaaagaaatctcttcttctcaagcatatgtcgatgagatttaccaaagatacccacggccaatccgaagttaacatcaaatcaaccatcttctatcacgatgttagctaatctttcgaaaccatagaaaaaaaaaattcataatatggcaagcaaaaccacaaaaaaaactcgaaaacatttctgaatgtgacgatggacaaagtcatgaaattcatgaaaaaaactcgaaaacatttcaaaacgcgatcaaatctaaatagatcatgaaaattgaaaacagggacaaagtcacaaagagcataaatatcaccaatctcaagaatgagaatgaagatggatcgagaccgctatcatattcatcaacaacgaacaaacccaaggaaaagaaatctctccaaacttagaagactaccattgacagtaacattgtattttaagccttaaatggttaaacatgcataatcttaatggacctttaagcaagcctagttagtcaataaaaggcctaattatgtataacgtatagtcgatgaaatgaaatttgtcacatatattttgcttgcccttcaaaaaattcgattggtaaattggtaatatgtaaattacataatggtggaaacacataaaacataaaatactaactcatttacttttctaatattcttttatttatactttttaaaatcaaaacaaaacaaaaaaatcatatattttattaacactatactgttaaattgacaaaatacttgcaaaattgcactaaaaactagattttaacccgcgatgtaccgcgggactatttattttattaaaaataactaaaaatatattattttataaattatctgtatgtaacatattgtttgtattttataaatatataatcataatttttatatattgtacaatcccttgattttatcatggagtacaccgtaagtcgatttttaaaatttaaaatttaaaattatatatgatttttgttaagattgtttcttttgtcatatattttaaattatatcattgtattttaattgttagttataggatttcacccgttgtataacgtgtcgtattactataaactcaaacccgtcttaccatctaataccgttcaatgaaattaaacatatttaatggatttcatcctaggtatactgtctaatattactatcgacccaaacccgttctaccatctaaccccgttcaataaaattaaatattattttattatttttgttttaataatactttaattttaattatatataattcaaatcaatttcaaactttttattttaaatggttatttaattgttataatttataaagttcatatattttaatattctaaaaccgtcatacaatctaatcccgttcggtgaaattaataattattttttaaattttttgtttaaataatatttttattaaaagatttataattcaaataaatttaaaaggtgtctttcaaatagttatttgattttttatagattttacatctaaaatatttctctatatgtaacatatagttttgtattttataaatattataaacgtttttctcttaaatattataaacgttttataaactttaaataattataatatttacctttttaataaagtataatattaataatcatttaaataattatgtatagctaattttaagggatttgatttaaagtttgttgtttagattaaatttgaatgaataatgtgattgatatattaaataaagaattaaaaatcaaattaaataattaaagaaaaaagaattaatgccaatggtataccattgtaaataagtgtcaagtagaggatttatttgctaaaatgattagaaaaatgtatatatagataccattaccaatctaaacctaaacacttacttgcgtgaagccatgaactaacaataataatacacatgtggtctgacgataaatctgattttcatacgtggcatactatgtgtgccccattctataaacaaattgctaatccaaaacaccaatcacactcctctctctgtttttttcttttcttttggcgttttccgtttggtaaaagatttcatttttattagcttttcaagattcagagattcctaatttgttggtaaatggaaccactcatcagcccacaaccacgtttccgcctccaacccataccggaaaatccctcctcctcctcctcctccgcctccatcacaatccctcgctctatctcaaacacttccttcttccatgaaatctcccaagaacgtcttctccttcatcatcaagacctcgaacaatccgtacaagacgacaaagaagaccaagactcagactcagacgaaacaaatcgctttttatctcagacaagaccacttcaccgatctcgtacagctccagctatggtaatcatcaaagacttaagaaccaaacctccagaaaccaaaaaaccatcaccagtctctaaatccataatcagacaagcgattttcttgctaatcgtctacttaaccttaggcgtttcaatctactcattcaatcgtgaccactactcaggaatcgaaacccatcctgtagtcgacgctctctatttctgtatcgtcactatgtgtactattggttacggtgacatcgctccgttgactccatggacaaagatcttcgctgttgttttcgtcttgttcggattcgggttcttggatattttactcagtggtgttgttaactacgttttggatcttcaagagagtatgattctcaccggaatccaaacgaggcagcatcatcaacaccatcatcatcatagattctctgctaaagattatattattgattttgagaaagggaggatgaggataaggatgaaagtttgtttagcgttatgcgtcgtcgttttgtgtatcggtgttggtgctttggttttgcatttcgttgaggaattgggttttgttgattcggtttatttgtcggttatgtcggtgactactgttggttatggtgatcgtgcttttaaaacgcttcaagggaggctttttgcggcggtttggctacttgtttcgactcttgcggtggcgcgtgcgtttttgtatttggcggaagcgagaattgatcgccggcatcggaaagctgttaaattggcgttgaatagagaaatcactgttgatgatttgctcaaagctgatacttatcaacatggtttcatcaggttaacatcttttaaaaacctcaactttgtttttttttttagaatcttggattaattgcttagagatgagagtgatttgagctgattctgataaagggttttatgcaatttgtgtgaagtttaggtcaaataagttgcagagagtgttaagctttagattaatcatgttaatgttaagactttttcttgcaagcaacagtttagttatgtctttgtgtaatctaatttcaatgatttaagtttgagtgattagtgttttgacttttttttttatgttttgatttggttttggtgtgtgtttcagtaaatcagagtatatagtgttgaagcttaaggaaatggggaagatcactcagaaagacattgaccaagttgtgattcagttcgagaaacttgatcctaatcaaataggaaaaatcacattacctgatcttttgggggatcctttgtgacagaagaacattctctgtctctgcttttttaggttttcttcttattcaattatcttctctttttttaattcctttttaaagaaaaataactgaatatatgtagcaacagtgattcatacaaagaattatctctcagtttataagagataatatgaaaatgtatatgctttatttttgctctctataaaaaaattatgttcaaagatattcgctaagcgctaatcagatgctcgggcaaggttgttaacaattttctttattttattttattttttattatttttttaatatcaagaggttttgggccgagacacgtaatctccaaagtccgtaacaattttctttatttatctttcaaaataatgaacatgtcgagatattttcatgtatatctttttttatgagatgacaatgaacaaagagactgagacattcatttgagtttggtgagatatataattaagaaaattaaaaatgatatggacaaactaatctttcacttgtgagatcagtcagtagaaagctgacgctttttgtctcttgattcagtagaaaggtcgattgactaagtcatcaatcctagtccatgcacaaatttttttagtctaaaatgattattaaaccggtaagattgattatagaatcagataatcagtttaacacagattggtattggttattctgcttctgcatatcaatttatcattaaaacaaaacaagttgagagttgttgagtgatactactcggataatgactacatatgagaattgagaagaaactttttagtgttttctttaaatgttttagctgaatactttagctttgaaagaagaagaaaaatgtaggaattgactttttatagttatttcgatcatctcttaagataatttaaagtttgaattaatattgttgttttcggacgtatcttatgaaccgacaacaaagaatctcataaaggcaatgtaaatgggttccacttctatatatccactacctttgaactgatcaaatgtatgattatgatctgtgtttttaaaatatatttagcagtgtcattttttgttgaggatgatttgttgtttcgtgttgtactcaaagacaatacgtgtattttcgtatttctgacagagatagttttcaatattcgatagatatacactttatcgcatgaagtcccaaaatgtagaacacaaatttcaactactacaatttatagtgaaagagaaaattggtctatggtagttgtttaaacaaaccagaaactttcatatcaataatacaagaaaaaagaaacagagggatttgattattggtccatggtagatgtttaaagtaaaaagacagaagaaacataaaatcaagtttaagcttgaggtttgtcccacttgagtggcttcacgacctcccaggtgaagtcagggtcgtctcttccgaaatgtccatacgctgccgttttctgaaaccttccatttcctcctctcttcaagtccaagttgattgtcatcattcctggtctgaaatcgaatgtctctttcacgatcttcaggatctccttgtctggaatcaaccctgttccgtaagtgtcaacgaagacagacaatggctcgggtactccaatggcgtatgagacctggacaagagccctgcgagccatgccattagccaccacactctttgctgcttgcctcacgatgtaagctccacttctgtcgactttggttgggtctttgcctgagaaagcaccacctccatgagctccccatcctccgtatgtgtcaatgatgatcttacgtccagttaaaccagcatcaccgtgtggtcccccgatcacaaaccggcctgatgggttgaggtggaagatggttttgtcgtcaaggtatttctctgggatgattggtttgatcacatgctccttgaggtcacgcgcaatctcgtcattggtaacggtttcatcgtgctgggttgagatcaggacggtgtggacacggactggaaccatagcgccattgtcattgtagtactcaacagtgacttgggtcttgccatctggtcttaaccaacggcaagttccattcttcctgacttcagtgagacgagcaccaatcttggttgcaaggacatgactcaaaggcatgagctcaggggtttcatcagtggcataaccaaacatgtgtccttggtcaccagctccaatgtcttctggacgtttggtgaagtgaccgtgaacaccttgagcaatgtctgggctctgttgttcaatgttaacaaggactttgcatttgtcagcatcaagaccaacatcgtcagagatgaatccaatggaacggcaagtgtcacggacaatcttctcgtagtcaatcgtagccttggtggtgatctcaccgaaaaccatgaccatgttggtcttggtgcatgtctcacaagcaactttgctatcagggtcttgctcaaggcaggcatcaaggactgcatcagagatctggtcgcaaagcttgtcagggtgtccttcgttcacagactcagatgtgaataggaaagtctccatttcttaaagctataacaacaaaaagaaaaattgaatcagcaaccacataaaaatcatacacatataacaaactttttacaattgaaaggaagagaacaaaaaaaaaagattccacactcaagtgacataaaaagctaagaaagattccaaatcattgtggaatagcataaaaacagacgcatctcatccaaagagattcgattcttctgatattcatagtggaacagtcagtgataaggatctaattaaacgtttaaggaactttcaagcttaactaacaattcatggacaataattaacgaggaaggctcatttatggctcagtacacgatcatatactactactactacatttatcaaatcatatactactactactacatagagtacacgatcgatgcgaaaatcaaaatcatttgcaaaaaagataaacctattaagcagatctgctacacagcactggaaaattaacggatccacatacgttttaaatctgtataaatcacaaacgatataacctaagaacttgagaatctcatttcaatagtcacacactatcgcagatctaattataataacaggcgtagaaggttcgaatattatcaaatctgaatcgaaacccatagaaaaatctcatttcgtttcagatttaacaacaaaacccgtaaaagcatcgcctaaaaactcgaaatcaataagacggagaagaagagcgaaacctgcggcgattagagatctggggagcctaaagcctcaaagcaaaatctgaacagcgagcgaagaaggaaacgagacggggacgatttgtggatgacaagggagtgagctatttatagggattaaatgacactgttgactgtccaccggatctataggtttttgcttttggacttcaattcttacttccatcggcttattcggctacatttatttatttgctttttagtgtttttaatgcgttaattataaacacaattggaaagtgaatcaaatcaatttattatctcacgtcacatgaacttaacatattgtatttggtcatggctctgattttttttttacagattttgataccaagtatacttgtgtcgaaatatgtatttttgaaggattattctttgtcactaatctaaatcatcttttttatgatggtctgaaaattaactaataccaatttttactagaacaattctttagaaatagtgatactttttcacaataatatagtaatgtctctctctatcatttcaattgacatttaaggtttttatatacaagttaagaaaacaccaaatttaaattaaattaaattgtttcaaccaattataaaatatgctggaaaaaaatgttgcattaaaagttgcaaacatcacttaaactgaaacaattttttttctctaaaacattgtctaaaatgatacagaaaagtagaaccttaaaatatttatatgaaacaataaagttggtaaagtatatatatatgtagaatcttcttgcctaatgatggacatataactaagattagaacttatttcattttcaaaaataaaataaaattagttaggaaaatgaatacgagactaatcataagatcattggaaagaaaataaaagactagtataataaggtgaggccaattaaaaggtagaacataaactttcatgacatagttttggtaggtgaactgtgaacatattatcaaacattcctataaataattatgtttgttgttgaggaaaaaatgatgaccattggatctctgattaaactatttcgatagatttaacctacctcactcaatcatattttcttttcacactatatttagggaaaaatcaataagtatcacgctatatattaccacaataattaacctaccatgattaaactactaacttatcattaaagtttgtaatcgagcgaatctctgaattaattagtgtatgtctgacaaaaagaaaaaattaatgtaacaaaccgggaggtgccggtagctcaacaaatggtacaggtttcgtgagactaattcggctcggcttaatggctgattcgtgtgtattgctgtagtggggttggtaatgcacctagccattctttattttaggagaacaatgtgtttttgttaaaggcatgataaacgttactaatttgtttttttttgtaaagaaaaatcaaatgaagacgacattacattttctaatttttacttatatcatgatttaaaggaagcttttagaattgatgcttttttcataagactttagtctccaacaaaaatcatattttcctctgttttttttttgttttttgaatattatgtaaaattattcaaaaaaaactggtttacataaagtgcagtttgtgtttgagcaaaagttgagattatatacaaagtcttcctccgttttaactttgtaaaataccaaatactcctccatgataattttaatttcatttggataacaattttttttttttttgaatgcaagtccgtagttggtttaaagttaaagattaagtgactttatcaagaatttatcaaaaaaattatgttgctgattaaatcgtgtactataattgttgcaaacacatttattttcctacttagatttagcgctggataatcaactatccgactaattaattatgtaagtgagtatgcatcttgataaacagtgcttcacagattttgtggtttgcgaacatgaattttatggaagttgagccgttggaagataaatgcttcatttgtttttatggataactcacaacttgctttgtggataatataattaatgaattgatttaccagtcaactttaagtgttagtgaataattgtttaagcccaaaaatcgtcgaaaattctaggtcgtgtgaggaaactgcgatgagaaggaggtagttgaaaaaattgtatttgtatgcatgtgaaactcatgcaaaacaaatacacgtacatataagttttgacctgtgttcaacttccattttttttttttttttaccagtcttgaactatctaatatctattacgagtttacgacatttgttagtttcatgaaatggcgtctccgatccgataactttaaataagtaattaagaacgttgaatttcacgactactattccatatgcaaatcttcaagtgtcttatattttgtaaataaaattaagaatttgtataattaggtagtgttagaatataataatcatcacaattgaaccgacacctcaattaagagcgaccatatagtatggaagcacgatacagtcgaccgttagtgaatcttaaaataatatcatcaatgagtgtttcttgggtgtataaaattagtgaaaagatgtgaagattttgtatccttaaactaaattctaaaacacacaaatttaagaatacttttattgatcagccaacaattttttgaagaatatgcgaagagttttttgttattccttctcttgatcatgcatttgaaataaacatgattttttttttatttcttaaagagaatcatagatctggtcaccgaccacgtaaatgattgattattaagtgggcaatatcttgattcaattattagaagtgattcaaaacagagacaagtacaaaaaaacaacagtaaactttcgtctcgtaagaaagtcacataatactgtagttacaatattaatcttatcaaaaacgtagaatgaaatcgaattctcataaacaattatatatgtatgaaatagtatatgatctactatatatataaatcgaactttgacggatgtatcacaaatttaatgatcacatcaaatgatatcaaatctgtaaagaagttgattactattaatcagccgaattagttgattagaattaaataaggtcatgtgaagtgttgatatttctctcataaaggtcccacattggcacaattccataaccaaaatcttgagcaataataacgttactatcaaattgggttcagaaacatgatacataccagaatttagcagagcaccgacttcggccaaaaacaaaaaaagtagagcaccgacaaaagctcagttctcagatcaaactgaaccaagaatcaaaaacggtttactctgaccgagtactcaaaattggtttggtaaaaattacaggtctcactgttgtaaataaatactagcagagccagagggtagcttaggacaaattacctcaaaaactggaatcaaaaacagggttctgaaccaagcttttgttaaccggagaattcaaccatttggatcccgcgtcccgcaacagctatttggtatcggtttctgcagatagatcaagtatacagatttggtatgtgagatataaaagttttgtttttgttttatggaccatggaagtatgagtgcatattacttactcatcaatggctttagcatctagtgcctctggctcgggcacgctgatgactatatgagcgtgctcgatcagtttaccatctttttcgagaaaccaacatcgaacacgttgatcaagacctgtcgagaacacccagttcgtgtccatccacacgccttcatcgcatcaaaaccaagactttagtattttcattagggaaatggtgaaagagaagattagccagcctagtagagacttatatgatttgagaattccacatagagctttcggggtaaagtacctttgatggcagagctatgagctgatgcaatacctccacggtctgtgagcatgattctgtaacttggggtttggtttagatccatgatttcagatattgtggctcgattattactactactgaggatgttgaagctaagacaatgaagggcttgatcatcacccccgctaatcacattgaacatcaaaccattgccataactcggagaactgtttgagcgagaaacatgaaggcaattaactccagattgatgagcattcttcacaacatgtgaagtctttatctcgcttgtctcgggaagagaatctgcatcttcgtttttaccattttcctgaggatggtcatttgtgagttccaaagacgaggctggatcttcttctgcagcttcaccaactgagttgctgttctcttgggctctcttagaaattttggagcctaacagtttccatttcctaccaccttgacttcctcttccagtccgtggtcgtaactgacaatcaatgtacttctcaatatggatgctagatacttgctttacaaaagcttctacacatttagttacatcccaaaagcctatgcttccatctgtggccccactgatgagcagataaacatcactatatggtgtattacctgtcaggtaaagttatcaaaactattacgacaagaagatttcaggaaaacaatttcatttagcataaaaggaaacgaattgataagaagtcaactgatagagaagtattaatatcaatggctgaaccttcatgagggggatccagaggcacaacggcgtgttgtaatgacaaaactggagattttagaggaaccaaggatgcaacatcaaacctgaaattagacgcagagtatatcaaaataaaacacaaactcaaggtgaaaatgcaactcatcaaacaaataaaatacttctggttaccataatctatgtggcaagactagagcacgtaaggtaagggtggcatcagaacaagccaccgcgataaaacagatagttagcctgaaaagatgaagagaaaagatttcaacattgtctaccattgatgggttcaatcaaagtaagtgaaagctgtccctctaacctagaaccaacacatttgacaagaaatgcagtggcagccatgtatctccagtcatcttcatagttttctcgctcattatacgtattagatcctaactttgtgacgttggcagaagtatcttcttcaactccttccagttttggagatttctcgatctttccacaaggacgatatttggtgggcatgtcagtagcaagccattggaacgtcactggagacacttccgatgacgctctattgtgtccattatcactaatacaagattctccctttttcttgtgtctaccattccttaggagccaagaggttacaacacgcttggctccaacagaaatcagtaagcgaggactttcgcaatcatccactgcatagtcttgatcgcacatgtctggtaagttaggtacgtccgaagacatcatgtgcatatttgatacgcagcaaactgatctcacagctgagcctccaacatgttctcctaaaagctctgatgttgaccaatttccaaactcagatgcatacctagacgaaccccaaatactttaagacatttaaataaaatgatttctaaaccgccagcaaatatcactgaattaagtttaataagactagtacctacctactcaatctcacagatccatcttcacaccctgttgcaatccaactagaccgatcagatattttactttcttcagaatcgaatcccgcttttgtatctgtagagatgaagcataaggaatgcaattctctgccatgaaactgtgtatgcaaatttagaggaaagactttggtcttctgtcctccaacccagtgtctatgaatatgaatgacatcatcctaaaaaaagaggcaggttgacaatcagtcaaagaccaaacattcctaaacaactttaacggagagacaaaggatgcaccttcacatatgcaaaacagttttgccactcagggatttccccgagataaaaggaatggggtcggcgccagccaccacatgagatttgtgtaacctattgacagaatatcgttagagctcgcattaagaaggtgaaaaaaggagaaggcgagggtggacctttgtttcagctgttaaattccacagtatgaaatctgttgacgcaaatccggctgcatagtcattgtttggatggtcttcggaaaattgcaccccttgacaaacagattgaactaagttcaattctttcagttgtttcaaacccatgaactctaaagtctgcatctctctgtcatattcgaaatagcatatgcaaccatctgctccagtctaaacatgagattgcgaaaaaaagaaagatcaacacaataaagtcattgtcagcgtgacaagaaaatactactgaggattgcatgatttattctccaaaacaaaaaaaactaccaacaggaaaagattaaaaaaaaaacgtaagttaaattagtcataccgagcatatttcagctttgttcgaagttaatctagcaactgaaagactggaaacagttgaaatcccatgggcacctttgaaatattttagtgatggtatcttcaattctgaagaaacagaaactccgtgcagcatgtcctttgtcagaggaaagagtgtgatattgccacgtaaatctccacacagaatcacctacaagcaacaatctttcaatgcaaattactaacttaacaaggcttagacacaaaactcttggctgcaaactttttagacttgatatcttaagaaaatttatttcctagttttcgcttaaccaagaaagattggtgttcttttgctccacatttagttgaccatggtgataaattaatatgcatcaactagagagtataaagaaagcaatagaacacagaaacatgacaataattgaaacggatattacctcatcctctactgatgcgtcaacacacattattcgctttccaaaaccagaggagaattcagccaagagggagacatcataagtttcagcagcagattctaaagaaccggatagtttccatagcttcaagagtcctctaggattgcaagaaaaaacaaacctggaagccagagactgaaaactgtaatctcaaaaatattccaaccaaatgattccacacattggatgcattgtctgagaaaattattcagataaatcattattcaggtccaacatccatttacctatagcctaatgatttgcaccagaatgcccctagaagttgtctctctgggctagccttccaactttgattcaagccagcatgtgggttatacatatcaccaataacccgaacaattgtcatatttcctttgccatctccaagagcaacccaatcgtctaatgcacaagactcgcgtacctttccaccagacatgacatccatggtaataataggcccttcttcaggtatgcgaactaattcagtccaccttacatttccagatgacaataaccttgcgtggtacaagcaaccatggtttgtggccacataaatggtatcttcctgtgtgaactgcaagcaacgtacatactcactcttgctgcaaggggaaaacaatcatatttacaattatacacaagaaaccacatacacctatttacagtaaaagtgaatcccgattaacagatttctttagcattttctaacatttcttggcctttactgcaatccatgttcaatatcaccaaattatgcattcatttggcatacagtaaccaaaaacgattttgtagacactaacatattgtgaagggacatgtattacggtactacctgtccgttagaccagtatgcttcgttgaatttgggagacaggttgaaaaatattccaatttatctggtgaattaagcactcctacagcatctaacgatgtttcagacccacgattatgcaattgatgtactttgattgcagagtcaaatccagcagtaacaagaagggatgagttcggatcatacaaacatctccatatgcctcttccactgtatagtaaacaataacttattatcaataataacataaaagagtgatgtggatagtgtgatcgacaattacaccatgtcaccacttacatatgttcttttatcacttccagctgggtaccatccacgccccagacacggcatgtacagtcctcaccagcagtgacaatcaactgaaatagaaaaacttccactttcaataatctataagttgaattttcaatgtgcgcatcaatggtatatgatcatatgtaagaacagatttatacgtttatgcttagaaattagaacagtgacagtatctctattcatcagaatctggctgataagttttctcacctcagaagcgctgaaattaacatattttaaatgattttacgctcgtagcataatactcaaatgaacacagataacagaccattaaaaaattgtataaaaatcaaagaatttcgaggtacatacagaatctgagatgcagcagtcccaaaccctaacactgtgaccaaacagcacagggccaacgacctcctgcgagtcaatttcccatatcctagcactacaaaagcaaaagattatgcaattagatacattgacaaaaggaatcagggaaatgtgaagtatttaaattcttaaacataaaacaaacgttcacctacgatcatcagagacggagactatttttgatccatccaaagaccagacaatgcgaaatattgaaccctcatgtccagtaagtctaagcatatgggaagcagaataatgcccatggtcgacattgtcaccatcaaggccaactgccctccaaacaatgatctgccaacaaccagtcgagtccaagttacataagctatcttagacaccatactagaatcacgaaatggcagcaagactaataacgggaaaaagatctaaggtgaaatatgaagggaaataaaagttagcctacctcattgaaaatagtgccggaagcaatacggagagtcgaaatactgtcgccccataaccgcatagtatacagtagacacctttctgcaaccaaaaattacttaataaatcaaaacctctaacttgagtcatcacaccccttaaaccccaagtacagtaaaactaacctggtgactgaatttcaaaagccatgcgtgattctttaacatcccaaatgctgagggaattatcactacaaccaatagctagaagcttatcttcttcttccaacgaaccagtagagtcctaccacaagaacaaacccaatccatgaggaacaaggaacattataaaatcaaacagacaatgcaaaaacagagattttaacctgtaagaaacaaacgtcgaagacccaattgctaagcctaggcaaagattcaaaattttccaaattcacggagatttcaccagagctcgaagctaattcaacaatcaatgaaaagatcttcactttcttctctccaaatattacaagtttatacgtatatctttccgccgaatgaacaaagcttttgctacaaacagttccatggacgcgaactccctcaaacacttgaaacgatcgaatcaattccccggaactcaaatcgtaaagcagaatctccgaaccggaacctatttgaataaattaacccctaattacatcaaaaactccaacaaaaatttgaaaaacaaagatttatcgtgagagctcaccggcgagaagataaggaattgaagaaacatgttgaggaagattgaggaaagctagagaagagacttctcctagatatggaccggcgtgagggttccacttccggcggctgttttcttccgccatagctttgctacgacagtgcggctccgactccgacttgagttcaaagtttagaggcaacacaaaactttgcaatagtagtcaaactttccaagtgagtcaacgagcctcgaacatttgggcttcatatatgggcttttagtcgcatgttaatgggcttaatgctttttatgtacaaaatcaaataattgagcaggaaagagagcgtagagaaagggcccaatactaaaaagttagacaaacaaaaaaagtaatgcggtgagcgtggatcgaacacgcgaccttcagatcttcagtctgacgctctcccaactgagctatccccgctttgttgttattcaatgacacgtgtacttatataatgctaaatgcatttatttttgtttgttttattgaaataaaaaaagcgagattacataaatatgacagtcttttataagaaaaggagaaatcgcattcagatatcgcaagaaatccacaacggctcctcaaactgaccttcaagcttgtcaccatcttgaccgttcaaattcaactgactcaaatccaattcatcagcagtatgccacgtaggagtcccatcttcatacccattccacgtcagcctcctcaatcccgttccgtctaatttcacaacgtacaaatccccataaggctgaaactgattcggcatcgtcaccggctccgccgttactccgctcaaattcgccgcgaaaacaagccaatcaccatctttattgaaactcacatgattaactctctccctcgccgcttcctcagacccttccggtcccgaaatttgaatcctcctcaaaccagtaccgtcaggtctcaccacgtaagcaccgaacacggccgtgttctctggattatgacgattagatgagaatccgatgagatctcctttcggagaccagcaaggcatagtgtcaatccatggcccatccgttaaccgtcgtattccaccgccgttagattctccgttaacggcgtctacaatgtagagatttttatgacctgatctaccagatcggaacacgattgatttaccgtccggagagcaagacggaaaagcgttattcccagtgttctctagagtgagaatcttcacatcacatggaagatcttctttatcagcggtgagatctgatggatcgaacttgattcgagctatctgaaccgcgattctcgccggagagaagattggacctagagatgtgtagattacatgacgctctgttggactccatgaattgtagaaagctgtacggtctttgatcaacgtccatcgttttgaaccgtcggatttagatactttgattccaccgttgatgtcgaaatcggagttcaatgcgattagatcaccgttgggagatgatgatggaaacgatccgttgattcttagtaatcggagggttttgattggtgaaacgatggattcgatgttaggtacgattgactcgccttgagttgactcgcctctgaatcggtggtagccgaggaactcggagtctggagacacgaaagggttgtaatggtggaaactcggattgagtgactcagtcaccggctgaaacgttgtgttttcaaggtcgtaaatctcgatgtgacggtggttgacgccgcgacggcgagttgctaaggcgattcgtttcccgtcgcggaaagctgcaggagtgaagcaatggagtccagatggagtgactcggattggtgtgattgggaaatcggtatattccgtgaaattctccggtatatctacccggaagatgctccaccaaccgtcgtctgcttggtggtggaagaaaacagttgaatcgccggaccaagtcggccatccaccacgctcgcagataaccactcttgtctctggttttgatgctttgaaaacagtaatatcagtgttgatctcgtgaaactcaccaccccaagagcgagttccataagaagcaacggctaagaaatctccagattgagaaaccgccggactaaagtcggcggtgtctggtggagtgacacgtgtaacttctctctttgcgctgttgagctccacggtgtaaagcgcagaccaattcttgaaataacgatcaggttgctcgtgagcagagatgaaatagagtctgttgttttgagtgatgataggacggtcgtggaagtagctctctggagctccgggaatctgctcgggcttagaaattccggatcgggttttgtaaatcctggcggatccgtttctttccgaaacaaagacgacatcatcgcttttatcgttgacgaattgagcgttgaagttcacggaaacgccgtctgttaaacggcgttcgacggaggtggctatgttgagagagaagacgtcgaagccgtagtgagttcgaccgacggtggtgaaaatgatagtgcctttgggagtttccattgtcgagtttttgatgaattgttggtggtaagtgattcgagtatttatagaaggttgtggaggtgtttgactatttgactgagtgtgaagtgtgaacggaacaaaactgatccgtacgtgcgtgtgtaatgacgttgcagtcttcataggatcttttatcgttaattacgtggaaaatcgacgcagaagagattcatgtatgtgtaatagaatgtgagaaaattggttttgaatactaaacagtggatttgaccaaagacagagaatgagctaatgaagttgtgacttaacaagcaaaatcgctgtcgtatacaccatgtgtaatatctcttctagttttcaccaaccaagtattaaataaccaacaagaatacaacatcaagcaatagaaggattgggttttccggcgatcagtaaagtattttccggcgagatgcttgccgggatatacttcactagctttgaatttaatccatgtttcttaacccacttcatcctccctgcatcgatgatctgtttgcatttgaatcctaaaacagctctttccatgggtttcattttcttcacaacttcctccacgctgatcaaagaagcatctcttacttctccttcttcctcctcctttgcactgcatcagaagaacaatcaaatatgaaacaacttatatgcagtaacttctttatcatctttaaatccaagaaaatgttactttgaatcaagaaggtcaatgtcatcaacaccgggaagcttggaaccgtgatcatcatctactgcccagctagtgaacgaagtcatgatatggaactcgtccttggaaatccccaggctaaggatatattctttatctgagagacacataaccatattcttgattaaatagagaagttatataataatctgatagatcaaagaagtcacagtgactgtgagtttacttatgtagcttttccattgggaaagatgatggcaacaagtcgcaatagcgagacctctaagtactgggctttcaccatcttgtctggataaacaacatcttaagctcaaatctattatcgacacataagaatgaacatcaattagcaaaaccagatgctataaatgaagtggaaatctaatagtgaaggagcaaagacataagcatgtagtgacctgttgcaggaccacagagatgtttccctacggccacataaggaacaccgtgcaaagattcaaccgcgttaaggttcaaatcctcaactgaaaacacacaaggttttttccatcattaatacataacctggaacaagtaaacaagaaaaggtactagatttacgggaaccttactatcgattctcatacgctctaatactaagctctccttttgcctcaatgacctatcagcctatatgcgataaaacaaatgtggactgaaaaacaagatagattactaaaaataacagaatgaacacaaactagcaagcttaaccaaccttaagcttgtaagatttcctctcaactagatacacttttttgatcccatagcaatctgctagcatctgtgttaagtatcctctcccagcgccaaattcaacaaccgctggcgcagtattatcgtctttctcttccagatcgctttcgcaacattccacatttatgttgcacctcttcaatacaccaatctcttccaagttaccaagaattgaaccttgctgcaaaacatgtttctcttgaaatggtaatttcctgccaaacaatatgtatcagtcccgaaacttctcctcgccctatccatacccaagaaccaaagctccaaactattctaaccatttatgatttacctatctatctccttattaaaccatatgttacaagcttcaggtgacaaatacgaatcttcgatatctttacaaataccgccatgaacatcctcaattttcttaataagctgatgaaacttagaaacactcatactatagagcagatttctcttcatctctgaagtaacaagagaacaagatcccatcttttcttcttcttcgtcgttcccagcattaatacccttctgataaaatcgttgaccagacaattctacagtttgtttaagtaaaggacatctctttacatgccattcgagattctcctgcaacacagagctaacaaaattcgaatcaaacagttgctacaatagcagaaaaattgcaaactataacctttgaaaaaaaaaacaaagtatttgactcactgagaaggatcaatagggcatggaatccattgaccttccaatctctggctatggtttccacaaaacctgtttgataactttgaaaaattagctcctcactaatttgaacagaagaaaaaaacgaaactttactctttcacttacatagaactctcgattcgagtattcgcgcatgatcttttcttcttcggaagccagaaactgcatcgattgctacttttcgcctccattctctcagccagagttttgctcttgagacaaaggagacggaggtcttcaacgggtcctaaaaagggctttttttggcccattaagagcccatttaagtttaaaatcgaatcaatctaagcaaccatttgaaaaatgacacgtggcatttccaaaaaaacaaagaagcatgtttcttctcctccttacatactctttaacgccataagtctttacattttcttccgccggaaaaacagatatcacacagaaaacacaaacgacgacgaagaaagaagaagatgtctgcaacggcaattctctctgtaaataaccctaaagacttagtcaccggatttggtaatcggacatttcattcccggagcaactttgctaaacccagttcgagattgtttccttcttcttcttctccgatgaagcctttgacccttgcttctagattctctcctttgatttcaacaaatagatcctttaaatcttcagtcttcaggagatttgatactctcatggagtggcaagaatgcaagtaagcgattcgatcttcccctctgctctttgactctctctgactgaggattttttgttgttttcatgtaatttggcatttttaagaactatgaatttttccttggagatttttcgaaattgcagaatcctgagaggtaaaggatctgatttttatttacttatgattgctctggagattcaagttcaatacttttatcaacgttagctttagatagtcaaatttgatggttttaactcttcatgtcatttcttgacaatgctgttcaaattcaagctatgattttttttttgatttttttggtcataatcaagctatgaattttatttggctttttggagtcaagaaggtttgtgtaagtgtttgaatctttatttttgtggagaatttcagagtaaagatgaaggtagaagtgcctgtatcagttgcttatggactctactcggaacgagaatcaattcctaaatggatgacatttatttcatccgttaaggtaatgatgtttgttcatatgatcactctttctgttggcaaatgatgttcagcattggattttgtttttttatattacggtttagttctgcaggtattgaaggacaaacccgatttatctcgatggaccttgaaatataaagcatttggtcagaatcttgagtacgcttggcttgctaagaacttgcaggcaagtatcatgaacaattgaactgtttataagtagctccattcattcttatgtatggatctttaagaatcttttgttatgacttcaatagttttggtatatatgccttgatatcaagaacatgttaaacagctttaatactctctttttggatctctcgtaattgttttctagattttgtttcctgcagcctctcccaaaccaaaaaatacactggatttctcttgaagggcttcctaacaagtaatagaactgaaacgaatcaatacgttctgagtctcaaaattcatctcttgattcttgatgttaacgtcttgctatttttacaggggcactgtccggtttttcccgctaggaccttcatcatgtgacgtagaagtaagtttccattgttcatatcatcggttttcgactttccaatgatttttctgagttctttgctttgtttgcagctaacctttgcatatgaagttccactgctacttataccatttgcagcagtaagcaagcattctttattcaacatgtgaaaactgtatcaatacttgatgattttagagagtgattcaacacaactaaatgtctcaaatcctatcttctggtaacatttcatatttgctttcttcaggcgcttcaaccgctaatgcaaggattgatcaagaacagtttggagcaatttgcagagatagcaaaaagcacaaagaccacttagttaaacaacacaacagcaaaacttatccacgacacacattatcacattgttcttacaggagtttgcacagagaatcattgttgtgagtcacaacttgtgactgttaccatattgattttttatagagtgttcatgtcatgcaaagaaaaagtttattatagtcacaatatctcagtcttcgactaaagactcttgagtttatctctgttggccggaaaataaacatgcatatcccttgagatattttaccaaatcattcatttttcacttaattttttagaaacaaatatatctgtaatttagagcccacaagtaccagatggctaaacccatgacaaaggttgaaaccatgtctaatgtcttattgatttgtccgcgtttgctcacagatgcgtaaaaagtcccacatggacaagatagagagcgttggtcataagtttagtagtaagaagctgagccctttggttaactcatacctttctcggccttttggctaagatcaagtgtagtatctgttcttatcagtttaatatctgatatgtgggccatcggcccacacgatattaactctattttttaagggagaaagcccgttaagatagcttgctatctaggctttcacgagtcccccatgcgctgcagtactgcatgggcctggctcaacccaccaactaatcagtcaaactttgattctcttagttatataattgagaaattacacaaaatctataaaacagcatggttggagaaaaaatcacctctttgtgtgaaaatgacattataatgggttagaacttagaaacattacatttgttttttctaaaaatggttttttaatttgtgtattttgatcatttaaactcgcaaaacatcaactatagcatagcataaagccataaactgtgcgtctatctgtaaaattattcctaaaactgaaaagttgttgacataaaacaatactatttgcacatgaaatggaaacttcacaatcttctaatggaatatatgaccacatgaattctagaaagtcaaacctttgaagtcgccaacgatgttctgatgtctaaattggagcattaatctatacaatatagtatcactaatatgcagttcagcttatggctaatgattttccaacaaataaggggtttgccatgaatttgagataatacatatgcactttgagctgtcttaacatcattatgtccaaataattaagatttacgagataatctctttttggctatgacttcaattaattaataagattatatatcaacattgtatatgtaacgaaacatgtatacttcagctacaataagtcaataattttaaaaagccttgagaagagaaagaagaaccatcccatcatagaagaagaaaaaaaaaaaaaaaaacctaaactcaaaatgttgaaactttctcgtgatccgattctatgtatcactacattaattctcattataacattttctctcttatcctatggaactgaagcaaggctacatcatcaagcgtctcagcctccttctccctctccaaaccctaacgacccgtcgaaatctccatctcggtcccaagatctcgaccacgaagtagtttacgacgtgaggaaatacggtgcggtcggtaatggtgtcgcagatgacactgtgtcgttcaagacagcttgggattcagcttgtagcaacaacaaaaacaatactgcctccgtcttgcatgtgccttacggtttcactttcatgatccgttccactattttcactggtccttgtcgctcttaccaatacttccaagtaccagttactaataaacttatttaatttctacatgaatatcaaacttttggataattgggtctaatggtttatttgctattgatttttttttaaaaacaataaaggttgatgggaccatcgtgccacgggatggaccaaagtcgtggccaagcagtttaaacaaaagacaatggctcgccttttatagaatcaacggaatggctctacaaggcgccggagttatcgacggtcgtggacaaaattggtgggatcttccctgcaaacctcatcaggtaattaaatactcactagctagtacacattttcaaattaatcataatctaaaaagtgaaagattcgataatgtaatgtgtggtttatataagtcatatgactatttgaaatcaaaatatttactatgtaatattatgataatatgttcaagcagaatgtcaacaaaactaaacttgctggtccatgtgaaagccccgccgtaagtaaaaccaaacatttaaaagattatatgtttcttacccttattattcatatttaatgttgaataatgttcaatggttttggtgaggttaggctttaaggttcttcatgagctcgaatgtaattgtgaaaggcctaagtataaaaaacagccctcaggttcacctcaaattagatggatgtcacgtagttcacatcaactcccttcgaatcatatctccgccggctagtcccaacaccgacggtatccacattgagaactccaactccgttgagatttacaactccgttatctccaacggtatacattcgacatacacgtctaataattgtctatatacattacataacaaatggaagttaaattgcaatggaaaaaaaggcacaacttcgaacatgcatcgaacatgcatgttcattaacaaaacttggattttattaacatattcaaatattttgatgatgtagataaactttcgcacaagctagtgattcgttaatgaaaaatgagacatacatatttggtttgaacttatttaaacaagtattttacattttcgacataatttaaaagaaaaaaaaaacaagattcattcaagatatatgataaggagtccattttgaatgtatttaattagagtgtaaacaaactcaagattcttgaaattttttgctaggagatgattgtgtctccataggacccggagcatacgatatcgatatacgaaatatcacttgtggaccaggagggcatggaattaggtaaaaaacgactcatggtttatgatttagtttttaacatttcgtaatatattcggtattaacataatcttgtgatttgtagcattggaagtttgggagaaaaaaactcacatgcgtgtgtctccaacgttacggttagagactcgttcataaaattttccgaaaatggagtacgaatcaagacatggcaaggtggatcagggtccgtttcgggtgtaacgtttgacaatatccatgtagatactgtccggaatccgataatcatcgatcaatactattgcacgactaaaagttgtgctaacaaaacatcagcggtttttgtgaatgatatagtatatcaaagtataaaaggcacatacgatattcgtagtcccccaatgcattttggatgcagcaacaatgtcccgtgcacaaacttaacactttcgaatatcgaattgttaccttcaaaagaagatattgttgtgggtccgttctgttggaatgcgtatgggatcacggatgagttctctgtacctttgatctcgtgtctcaaatcgaatccttcgacatcgttgttaagtggtctttcagggaggtgtggatcaccgtgatttgattagtggatgaataagagagttatttttgtataaagtttttaacttaatggatttatttgaaaaactatacaaacttaattaaaaatatccaagatctaaaattccaaaaatcaaacgcttttggatttagtaacttaagggcttttaaacttcatttctccttttatttttattgtttgaataaaatgtaaaatttattcgaaaaatttggttacatcagatgcaacgtttgattaatatataatatatatgttgaaagtagagattgaaataaacagattgtgggtttgttatcttgagcaaaaccacctcgccatacaaccgtcgtatctcccgtccccttgttctctaatggatgagactatgtttcgagtttgcttatcgattctttggatgagttgagatgatagaatagatgcttctccatgtctatggcggtttctttctttccatagtgaatgtactacaagctgaaaggcatatctcgtcaagaacaagcattctttatcgagagatgtatgtgtctgtgattatcttaatgatagaatcccagtgaggacccaccaaacctccgttgagtatgaacaagtgaagaacaaatggttacgtgattccaaaggatcttgacaaagaacacaagcgagaacagatttgggcctttattcaaacccatgactgattagttattgagtgaaatcactgaaatcaaattattttcattgcagttagtaatgtcttctttgacctggttataaagtttttctttttttggttatcaaagaaaatgcgttttgtcttttctttttataatacttttattgtttcactttccgcgcaacattcacgttttggattgttaaaatattcaaagcaagaatgagcattttccaattcggtctccatcattaaattcgataaaagtttgcgacttcggatttgacacaaatccaacggccaataacaaagaatagcatacaatatggttacgttgaataaatatttctagacaagccttgtgaacaaaaacgaaaagtaaacacatttgtcaataatttaagttggtcagtctttttttaagacccaaagaaagaaacaatgaaattcgactaggaataatctttttactttcttacccctggtcacgttttccacgatgaacagaaattatggagtaaagagttattaactttgatatatgattaatttaaattgaaaaatgtatggttttattctttatttaagggaatttaataatgtattggtttgtggattttggtttcacttagaaatctaattaaaactatatgttcttttctagaacacattttttaattgaaatacaaataaactagatatagaaaaataaattggaggttataagtggcaatttagtcttttctaataccattatctttcaccactcccctcaatatacatttctcctaaaaaccctaaattccaaaaacaaaagaaagaaaaacaaaactttcttcttcttcttcttcaccatcgaaaagagataatgaaccaagaagaagaaaaaacagagaacaaaaggatcaacgagatcgatgaagacgaagaagaagagttggagaacaagaagatggacatgttcttcaatctcattaaaaactaccaggatgctaagaaacgaagacgacaatacttaactcaagattctggcgacgttgcttcgatgccgaccaagagatccgactacagcattgttcctgtattccgtgctgaagatttttctcactgtatggacttaaacctaaagccatcgaattcgattatctccaccaagaaccaagaagaagagaagcaagaagaagaagaagaagaagatgatgaagaagaagaagatgatgatgaaggagaagaagaagttgagaaggtgatgagaaaagataatggtttagatcttaatcttgcattgtaataatacactttgttttttggttctgtttcgtgaataagaagaaaaaaactttcttaattacattattaaaagagtgacattgcaattaaacttaaagcagtgaatcatcaagtcaagaagctgcatgtgaaatttccattgatgaatgttagcttctcagctttgacgacagaatctagaggaagaggaacgaaggttttgtctggaccatagaagtgagggaagctatttacttcatccacagcttcatagattaatccatctccaagctgccaaataaagcacatcaaacaaaaacaaaaatgtcaatctcttcttagcactaaaatgtatccaaaacatcaacgtagcataacgattcaaatgacaattttgtaagaactttacatcaatgtccatgaccatcctaagatcatggttctgctacttagattgtgtttatccacaattgcagcttggtaagaaaaatgtttgaaacccattttgttttcaagtgtacaaaataacactaaactttagcacaaaccacacataaccaactctagctaactcatacccactttagctaactgctcctctacttaaacatggagctaatcacgcaataaactaacatttaccaaatcaaccactcaccaaactagaggatccctaacacaaaaatgatcataaattttctatccacatatgtttcaagttaaaggtaaaagtcaaccttcttaggatcgacttgaagaaggtaaagatactccttcacatccacgaaaaagttcttcaatgtcaattgtacctagaaatcagagaatcgatttcatcacaaaagcagtaaaaatctacataaaagtaatgatttttcacaagttcaaaccaaattgcctaagaaaatgagaaaattttcgagaatcttcatcacccaaatgaaaaagttgagatctttatgggaagagagaaagacctgatcaagtttgctgagatgataataacaagttgatttatcaatctctgcaccataagaagatccattcttcttaaactcttcccattcttgttccgtactgattctgtatatgaactcttcctcagccatttttgtttcaccttaaccagtgtgagatcgaaaaatcgtaactttaaagcagacttgattcgattccattccatcagagccacttcactaaaccgatctaaaccggaaatcaatttctgtactaaaccggttttattagctaaaccgactcgtcgtcaacttcgaagttccacttccaataattacctccttcgtcgtcgctttcgatggtcgaaatcagttggtaaagaggaaactctgaaagttgtgttaaaaaaaaaactagaatcatggcggcgtcaatgacgaaacccatctcaataacttctctcggtttctattctgatcgaaagaacattgctttctctgattgcatttcgatttgttctggattcagacattcccgaccatcttgcctcgatttggtcacaaagtcaccgagtaataacagtcgtgttttacctgtcgttagtgcccaaatatcttctggtaagccaacagtaatgagtctctgatccttttttcgatcaatttggtttcttttgtgtgttcatagcatttctcttttcatattttgttagattatattccagactcgaaattttacaaggtggaagcaattgtcaggtaagcttctaatttttgttttgatgtaccaatcaaagctcataattgtgacaatgttgcttgtttcttctctgttcatgtatgaatgttggactgataaagaccatggagaatccagcaagtttcatcggtaagattttccttgttctcaactttgatatgtgaaaagatttgaactttgctaatcacttgaggtttccattattacttgttatccatgaagagtctatagtgttttaaatgtggattttgaatactataaaacagaattttgagaaataagtaagagtagtagttcttatcgatgcatgcgaaaatcaaataatgtcagtgaactcgacaggactggtcaaatcttcgtttctctagtgtttgaaatgtgaatttgaattgaagggtttatggttctcatagttattgtagatggtacttgttacttccttagtatatagagatgattattacacttttgaaaaatccaaaactaaatcttgagtttctctgtttcataaataaataggctttactgaaaatcgggattcgaggtgttactgtttctgatgtgagagggtttggtgcacaaggaggttctaccgagagacacggtggtacgtccgtgaattcaagaattggtttgatgattcttcttattgtcaaaatgtgttcatgacttttctatacacattgttgcatttgcaggctctgagttctcggaagacaaatttgttgctaaagttaagatggaaatcgttgttaagaaagaccaagtacgtatatggttaaaaaaatcgatacttcataagcgaaattcgagtttgagccattacttttttttttcttgttgcaggtggaatctgtaatcaacacaataattgaaggagcaaggacaggagagattggtgatggcaagatttttggtaacacaaaaagttttcttgttactcttttcacaatcagatttatgtttgatacctcaaattgtaaatgcaaaatgaaattactcagattgtgattgtttcttgtttggttatatacagttttgcctgtgtcagatgtcataagagttaggacaggtaaaaacttcaaaagccatattctttttaaaagaaagacacagatcttggcttgccttaaaacgtgtgtacatgttgataaaacattttcaggtgagcgtggggagaaagcagagaagatgactggtgatatgctttcaccgtcttaggaacaaacagagctcaagaatggtttttttttttttcatttcggtctctagattctgcgaataataatgaatggagtctgtgtttggtttcatgttgaatcgatcaagatgtgtttttaactgtacatgaattatgcagaaacatctgtcctggttctcagacatcgaaactctgttcctaataaaagccgaagtccctgtttttattgtggtactagattttaatcacaatttttttttaaagttagtatatataaaaatttgcaaattgtatctatctattaaatatttttattttatagtttacaattgttattaagtaacgtcctgccaaacccgtaccgccaacccgtcccgtaaaaaaatttatttattttattaatgttgattttatttatgatatgtttatgaatcattgtttaaatattttgtaattttgtagtaattaattgctatcaaatatctctatggtttgcggcttataatcgaattgttataatcatgaaaaaaagcaatatcaaaaatgataattttgtagtgtttaaatcatattaattattttagaagttttactttagtaactaatcgtatagttaatgcggagagattttgggaaggtagttaaatgcaaatatttaattcgaagatttactttctaattatcaaaaataattattaaatatcagtggcagccactgtaaataagtcccaacttgaagatttatttcacagaatggctgcaaaaatatatatgtagattctcaaacaacaatgctttgaagacgccgttgtccaagacttcttgcgacaacgatacttcttttactttgtttcataatgatttcaagtaaccaaaagtgcctagtactactagtgttgtttgttagtagttctttgtctgctcctctagcaacatcatttctcatttttcttctctcttttgacaaggccaaatgtctcataactcaagagcctctggaaacacttgtaaattgaagaaacttcttaaagtctataagaatgttactgaaaccaatatttgaaaagacaacaaccgttttccagtgtaaaggagaattgcttctaatggaagcacaatataacctaatctatctagatttatatgcatatatctagatttaatgaagacgcttttggtcataagatctaaatgtaaaagcagacaagactgatagtattgtgttcttcatttttaatgtgagattttgtagaaacgaaaggcataacacgtttgaaatagctggatcatatcaaattaaaattgcaagattcttatataaataatacatcaacgaaatcaacttataatggaaatgaacttgtagaagaaatggtacaagatatctaaaagaaacccccactccctagacattttgggctttaagggtataccttcaccccactcgcttgacatctatccaaaggcgcattcaatagagcaaaagtacttatctgaggttccaactatcttcaagatgataggaaaaatgcaatgcatcttacacccgctgcaaaatggacgcgatatactattattgagtaccaccttagataattcgctaagatctatcgtgcttcctggcatgagccatgaaaagtctccgagcacacactttatatgcaaactagcccggtaatctttacatgtgtagaaccatgtctctggattggtttctttttcacaaatgtcacaccagtatttaccactagcctctttgtcaaagcatagtgagagaggatgatcgtcaactctatgctttaccacttgtggaaaagtggcgcatttgaagcatatggcaaatctgcaatcgtcttcaatgcaccttagcacagaataagaactcttattgcagccattgcaactactcttagtctcttcatctagtaaagtgtaatataagggatgatcgggatgacttggatggacaaacggctcagagattgaaccgcacccaacatcgaatgtaatgcccgaatactggtaactgaaaccattggaaaatctattacaagcttgacactgaaagaaatcatactcgtatgaaactagagtaagacgttcattgtgtagcacatgccatctctttctaggaaatccagcgcagttttggtggagaatgaagtcacaatccatacagccgtagaaagattggagacatatgggatgagtgcatgctctgcaccgcttcttgtcgtcacaaagaacaccattaacgtggagtcttaggtaatgttttttgtggctgaaatgttgtattgtgttgttgtctattaccacaaatggtttgatatcttctgtttcttcaggtactccttcgagttctttcccgttccacacatctttgttggtagcacattttgaatgaacgacgtagccggagcacctctgacaagaaaaacctccacaagtccaatccaccttccggtgacaaacttcacacacagaattcacaacaccaagaacagaagttcgcgaaacacggtgatcatgccgattaatgtttatgaggcgtggaagggaaagacagtcttgatggatcatgaaaccacattgaaaacacacgtaagggcttcgatctcccttcagcccgcaagcattacatgtaaaagaatcaagtcttgggagaagggtgagttggtgatcatgagctttcaaattcagaagagattgttgtggtggatgtagaacacaacgcatatccaaggtgaagttgcaagaagaacaatgataaaaatatctatcatcaatctttcttgcgcaaagacgacatgctccatcagaatagtccggtcgttgacctgtgtggagcttaagagggtgcgaggggtggtaagagtggtttacctctaaagggtgatatacctctgacggatgccatacgcaatccacatggaaggttaaatcacactcttgacatttgtaagcaaattcattaccactaatctttccacatttagcatcacaatcgaacgccgcgatccgctccttgagaagggtgagcttgtggtgatgcctctcggaattttcaataaactctggcggtgggtacatggcacagtgtagatccacgataaagccacagatctcacaataataggataggtaattggtgcgccttccacataaatcacagtgaaaacgtaagttactacaaagctcaagagtgtgattggggtgagatggatgctcgatatattcggagacaccgtcaccacatgtcttgtggacgaaaaaatcacatcttttgcaatagtagccatcgctgatagcttcaaagtgaccacaacaatcacctttcctcaggtcattccaaggcatcatttgatggttatggatcaacggtagtgacaccactcccttagaatccatggtcgtatactacgagatttggaagaataagaggttggatctgaaatcgcaaagctatgctcctttcacgtttctttctctctcaaaactcaaaagtcttctctcgataatctcaacgatgctcttgtaatattaatcattatattaaacttttgaattgtttggtctttcattaacaatgaatatagttttatgatagtgacaatataactaatcatcattaaccacttgtaataaatagtcaatttttaattctttagatgtataccaatcggcatgatccatttatgagcttcatctcccccattattttttcaacttcacttttgatgtacgttaaattttggaattaatattgatagaaaatctcaataagaaaactcccactcgttttcttataccaaggcattcatgtaccttctgagatatcggtttagttttggttatgtttcggtttgagaaatttcatttcggttagagtcagttcaattcggtttgtttatttaaacaggtccttcatttttttttgtatggatgatattggttggaagatgttagtcttagcgatatctcctccttcaacgactctcataagaccattaaaacaaaatgggcaaaaccggtcaccggtttgaaaaatcgtctgcttgagccagaggaggcagagcaaaactggcaccggaaaatcatggatcgtcccagtaaacctctcgctttttggttcaggcttcttcgtgggtcctcttctcgatggtctccactgactcacgtgttgatctcgttgtttaccaaaacggagcttttcaaatcggtcctcttcatacaaacatctgggtaagattaaaatccacaactttaagaatccttcataaaaacattctgtttttgatcttgtaaggtgtgttttttcaggtcccgttcttgcttggcttattttactgtacagtatgtttactacaactcctcttggatgatagaacctctataaagcctccacgttgcaacctgtgacaaaaccataatttcgctcttgtgagtatgtattgttgtgtagaagtataactattttggggacagtggaagtgaaactctatatggtttggtgaatgaaacagagcactggtgttgttcttagagctaagttctgaaatctacaaagctggagtttcagacaacatagaagcttacattctatttgccttagcagaatttatttggttctctttggataaacttggattggcttcaccattgccactctccttggtgtcgcctgtcctttagccgaaatcttcataatgcagtaagtaaactgcgcgcttcaacaaccatctctttgttttttatcagaagtcagtctaaagattgtcataacctggcttaacagattcttccatctgtggtactatatatccagaagcaaacatagagatctttggccaggtaataagtgtttatacagacatattcaaacaaaaacatacacatgaatactctgtttctttttgttttgttttctggtgaagggattggttacgtggacgacaacgtgctacttcgtctacacacagaacttgctacaatggcgtcttcaaagcattgtagtttctgaataccagatgatctgaaagaaacagtcatgtgtatgctttgaagacgccattgcccaagacttcttgcaacaagggtttactttattactaatgatctgaaacagaatgcacattgacattatgcttagggaatcttcttgaatgtctatcatggttatagtttgctcttcaaaaaatgtcaatcttagtactggtgggaatgatgatgacacaacattcttgagttaagaagttctctttgatcagttgggtgaatttctatggcatcccatctgaaacattagcgttcaatggtacctccataaccagtagcatggcagaatgttctatacaacggcgtaagtaagatccttcattccaaagacaaggcataacacgtttgaaacagctgatcatatcaaattaaaattccaagattcttagataactaatacatgccataagtaccattaaatcaacttcttagaatggaaatgaatttgtaaaagaaatggtacaagaaatctaaaagaaaagcctactcgctaaacatccgagggtccaagtatcttcaagatgataggaaaaatgcaacgcaactcacaccagatgcaaaatggacgagataaactattattgagcaccacctcatatgatatatgttacaacacacacattgtatatggagtttggtgccagaaaattcttagatatttaatacattaaggaaatcaacttataaaggaaatgaactcgtaagaaagaaaaaaaataacattacaagaaaaacctcgactcgctaaacatcttgcttcattttgggctttaacggtctgtatatctacactctgcacattcaagagagcaggagtattcattcgtggctccaagtgtcttcaagatgataggaaaaatacaatgcatcttacaccagctgcaaaatggacgagatatactattattgagcaccacctcatatgaagtgccctcaatttttattgtgcttcttcgcatgagacttgaaaggtctccaagcacacactttgtatgcaaactagcctgatgatctttacacgtatagaaccatgtatgtggatttgtttctttttcacaaatgtcacaccaatatttaccacttgccttttcgccatagcatagtgagagaggatgatcatgaactctatgctttaccatttgtggtaaagtggcgcatccaaagcataataaaaatccacaattatcttcaatgcaactaagcacaaagtcctgctccatgttgcaaccagtgcaccattgtacttcgtctgatggaaagtaatataagggatgattaggatgacttggatggatatgtggctcagaaattgaaatgcaccgaacatcgaatgccttattcccatgctggtacttgaaaccattggacaatctatcacaagcataacacctaaagccttcatccttgtttgtaaccaacgtaagacgttcattgtgtagcacatgccatttcattctaagaaatccagcgcagttttggtggagaatgaagttacaatccatacagccgtagaaagactggagacagatgggatgggtgcatgccttgcaccgcttgttgtcatcacatagaacaccattaacgttgagtcttaggtaatgctctttgtgactaaaatgttgtattgtgttttcatctatcaccacatatggctctatatcttctgtttcttcgggtaatccttcaagttctttcccattccacacatcttttctagtagcacattttgaatgaacaacatagccatgacacctctgacaagaaaaacctccataagaccagtccacctttttgcgacaaactccacatacagaattcacaacaccaagaacagaagttcgagaaacacggtgatcatgccggttaatgttgatgaggcgtggaaggccaagacagtcttgatggatcatgaaaccacattgaaaacatacgtaagggctacgatctcccttcagcccgcaagcattgcatgtaaaagaatcgagttttgggagaagggtgagttggtgatcatgagctttcaaattcagaagagattgttgtggtgggcgcaaaacacaaaccttgtccaaggtaaagttacacggagaacaatggaaaaaaaatgtttcatcaatctttcttgcgcaaagacgacatttcccatcagaataatccggtaactgaccctttgcgtagagtttaagagggtgtaaagagtggtaagaatggtttacctctaaacggagttctagttcgggcggataccatacgcaatccacatgaaaggataaatcacattcatgacaattgtaaggaaactcattaccaataatcttgcaacatttagcacatatacattgcttgatccacttcttgagaagggtaagcctgtggtgatgcgtcttggaaatgtcaataacctctggtggtggatactttgagcagtataaatccatgtcgaagtcacatagatcacaacgatagaatattgggcacatccttccacacaaattgcagaaattagtaggtctttcaggtcttagcagctgaagagtgtgcttggggtgagatggatgcttgatatattcggagggctcgtcagcacaattttttcggacgaaaaaatcgcaggttttgcagtagtatccatcactgatagcttcaaagcgtccacagcaaccacagcaaggacctcttttcagatttttccaaggcatcataagatgctcgtggatcaacggcattaacactcccttagaatccatggtcgtttactaagagattttgaagaagaagaagttggatatgaaatctcaaagctaagtttctttcacgtttctctctctctctcaaaagtcttctctctttaatttcaacgatgctcttatgaaaaagaagattggatctgaaatctcaaagctaagctcctttctctctcaaaagtcttctctgcgttaatctcaaatcctcaacgatgcccttacaaaattatttttttattagacttttggttttattggtctttcattaacaataaaaaataattaggcccaaaacccgcaccgtgccggttttttcatgcattttgttagttataataattaataatttacatcaactgaattaattttataaacaatcgttttggtgtttttttctatgattatcattttgatgtatcttctaactctcaagtaaatgattcattctatttattatgtttatttatttatttttagttacaatgtttaatatttatttacaattacttaacttagatatacaaaaaaataaattattatctttaaagtattttaagggttttgtgcaaaaaccactatacctcatccatttttgcaacttcaacctctacctccatcaaatacagattaatcattaacaatataaaataatatgcattataaccctcttttgcctttttttttgttaccaacaattttgtaaaatatcgataataatatgttaaattaaaactttcgcgaagaagaatttaactttaccttcaaaattttaaaaatctaatgtatataaccgtaaaaacgtttacaatatatatatatatataaagatcatattttgtattattttagacttcataaaaataatctgcatttattggaggtagaaaataaagttgcaaaatggatgagttagcacaaaaccttatttaaaagtaaacggaaaaatagttttacaatatcaatcattagtattattttattaaaatgaaccactagtttaaaatagtcaatttttaattctttagtcgtatcaattagcactatttatataaaaaatgaaaatgaaagaaatctaaaaacattggattcggatccatttttaaactctgaactatttttttatgagctggatatctcaattattttttaattcactagatcttggaattaatattcatattaacgtttgaaacagctagatcgtcaaagtcaaaattgcaacattcatagataaataatacatgaaggaaatcaacttattataatggaaatgaacatgtaaaagaaatggtacaagaaatctaaaagaaaagcccactctctggacatcttgattcatatgcattacatagcgcaataaccagtagttggcattatgttcaatacaacggcgtaagtaaagatccttcattccaaagacaaggcataattgtttgaaacagctgatcatatcaaattaaaattgcaagtttcttagatctaatttcttttttttttcttttcaaaagaaagacacaaatcttggcttgccttaaaacgtgtgtacatgttgataaaacattttcatttcggtctctagattctgcgaataataatgaatggagtctgtgtttggtttcatgttgaatcaatcaagatgtgtttttaactgtaaatgaattatgcagaaaacatctgtcctggttctcagacatcggaactctgttcctaataaaaactgaagtccctgtttttatgttagtaatctgaaacaacaattgtttgaagacgccattgccaagatttcttgcaacaatggtttactttcttactatttctaatgatcctgaaacagactatacaatacgttgagaaagaagcgaaaagctgacaatcatgataatgcaagactgatagtattgtgttgttcattttcaaggtgaaattttgtagaaaacgaatgtcagaaagcatttgaaacagcaagatcgtatcaaactaaaattgcaagattcttagataaataatacattaaggaaatcaacttataatggaaatgaacttgtgaaagaaatggttacaggaaatctttaaggaaaccccactcgctagacatcttaattcacactcattgcattagcgcaataaggagagcaacagtatttttgtgaggctccaagtctcttcaagatgataggaaaaatgcaacgcaactcacaacagctgcaaaatggacgagatacactattattgagcacaaccttatatgatctgctccaacgccttaatgtgctttttggcatgagccctaaaaattttccgagcacacacattgtatgtaaactagctcggtggtctttacacgtgtagtaactaaagtaagacgctcattgtgtagcacatgccatttcattctaagaaatccagcgcaatttttgtggagaataaagtcacaatccatacaaccatagaaggactggagacagatgggatgggtgcatggcctacaccgcttgttgtcgtcacaaagaagaccattatcgtggagccttaggtaatgctctttgtggctgaaatgctgtattgtattgtcatctattaccacatatggctctatatcttctatttcttcaggtactccttcgagttcttctccgttccatacatcttctctggtagcacatttcgaatgagcgacataatcggggcacctctgacaagaaaaacctccacaagtccagtccaccttctgacgacatactccacatacagagttcacgacaccaagaacagaagtgcgaacaacacggtgatcatgccgattgatgtttatgaggcgtggagggccaagacaatcttgatggatcatgaaaccacattgaaaacatatgtaagggcttcgatctcccttcagcccgcaagcattacatgtaaaagaatcgagtcttgggagaagagtgagttggtgatcatgagctttcaagttcagaagagacggttgtggtgggcgtaaaacacaacacaaacccaaggtgaagttacaagaagaacaatgataaaacaacctatcatcaatcttacttccacaaagacgacattttccatcagaataatccggaaatctagcagttaagagcttaagagggtgtaaggcatggtaaggatggtttacctccaaagggtgttttaactccgttgggtgccatacacaatccacatggaaatgtaattcacattcctcccacatttatcgtcacaatcgaactcgatccgctccttaacgatggtgagcttgtggggatgcgtctcggacatgtcaataacctctggcggtgggtacatggcacaatataaatccacgtcaaatccacatgtctcacaatgatagcctagacctttgatttcccttttacataaatcacagtcacgacctggtttagttagaagccgaagagagtgaatggggtgcaatgggtgtacgatagagtcacaagcatggtcgacacatttcaggcgtccagagcaatcacctttcttcagatcatggatcaacggtagtgacactccctcagaagccatggtcgtatactacaagatatttggaagaagaagaagaagaagaagaaggttagatctgaaatcgcaaagctatggttctttcgtgtttctttctctctcaaaagtcaaaagtcttctcttgttaatctcaacaatgcttaataacattaatcattatattagacttttgaattgcttggtatactcttcattatcaataaatataatttttatgggtatgatacttactgtcatactgacaatataacttaatcattaataacttgtaagaatatagtcaatttttaattctttaggtgtacatcatttatgagcttgatctcccccattagtttttcaatttcacttttgatgttctttaaattttggaattaatattgatagaaaacctccataagatatacttcctttgttttcttttactataagaagttttaaaagtttttgttcgttttaaattatttgatttttttcaatttcaatttatatttgtttaataattataactattcaaattatgtccttcttgttttcattggttgaattattattttttatctattaaatcatagtttcttaattttgcttttaactaaaaaatctcattaatatttggttcaatggttaactaagagttcattaatacatttatactagggtttgattcccaaaaaatgtagatcaatggtgcaaagtttatcggaggtatagaatgccgcacgcagagtcgttcgtagtggttttgagttgcgggagtgactatcatattagattaaatatttctagtgatgatgtaataagacgacaaaacaaaacaaaatagatacagctttgattgatctaagcagtatttgtttcatttaataaaacccctttaacatagacgatctaaagatatagcggatttgggtgtaggaaggacaaaaacatataattttagtttttatttgttcgttcttcaccccgctctaccccgcaaagaacaatagattttctagctagcccaagcattagcacgtttgtgtttgtgtacaccattgttcttgaagctcttgactttgtgtgaccgagactaagtttgtttactccatctaaaaaccataactattacctcttcgcatctttgtttttgtgatgtttactaaagtctagatcatggaacagtaaacaaataaaagtctaattggttaccgtgtgagtcatgtgcttgttcgatttatgaatcaagtagtcattgaagtagtgcttaccatgttgttattgtacatctatgttaacatatagttatagttaattattttatgattccaataatgtcaagacataaacatctaggacgtgttattggtttatgactttgaaagagatttagggggtgttattggtttagtgacttgaaatgttacgaagaatcttgtgttattcaattaagattttataatacttttaacaaatcaaaatctaataacactaaactttaaccgagtcttataaaatcttaattgaataacacaagattttttataacatttcaagtcagtaaaaattcatataaatcacaaactaataacacctccctaaattctcgaatatcatttgttaacttctaatagtgacaaactgacaatataactaatcactaaccacttgtactaaaatattttaatttttagctgtaccattaatgagcttcatttctccattaatttttttaatttcagttttcatattcgttaaactttggaattaatattgattgctatcaaaatctacgtaagattactctctttgtttcttttttttatttaacatctaaaaacctttaatatgaatcagatatacaagactacaaatacaactaatggtttatgtaacaaagaaaacaataaagcaagttatacgctgttttcttagtcaagtacttcaacgtattcatcatttccgtcaaatttttatgtgacttttttgcttggaaataatcttctttttatctatgaaatatcagtaacaaatacgaaaatcatatgcagcaatccatctgttacatcgcaaaacactcaaattgatcgaaactctcatgtagacaaagatataattgatcacatgtcgaaagagatatcattgatcttggttgtactcaaagcccatttaaattttgcagtatttgttttcaatggttgaattaatttttgttaggtattaaatcatagtttcttaatctttatgctcttaactaaaagatcttattaccaaaatgaataaagagaatattaggtttgataaatttaagcagtatttgtcttattttttataaaacttatcttacatagatctaaagatatggcggatttgggtggaggaaggacaaaaacatagaattttagtttttatttgttcgttttgcacccaaaatccgctctaccccgcaaagaacaatagattctctagcagcccaagcattagcacgtttgtgtttgtgtacaccattgttcttgaagcttttgtgctttgtgtgaacgagactaagtttgtttactccatctaaaaaccataactattacctcttcggatctttgtttttgtgatgtttactaaagtctaaatcatggaacagtaaacaaataaaagtctaatttgttatcgtgtgagtcatgactcatgtgcttgttcgatttatgaaacaagtagtcattgaagtagtgcttatcatgttgttattgtacatctatgttaacatatagttaattattttatgattccaataatgtcaagacataaacatctagattctcgaatatcatttgttactacatacaggccaaaatttgtctgccacgaaaatatatgtagattatctcggtatttcccctgttttcctcagtttcttctactaacatcttaacattacaactggattaaaaaaaaaaaaaaactcgtgtcataatgaattagtcatatacaacaaggctgctattggatagtgtggtttacacattagattttgtttagcgaaaaccggtttgtaccggatagattataatctcattgtccagaaacagtaatcacctcagatcttctcacagtttgctttctgaatctccatgtgattcactgcattcaccagtcaccacccttttatcaataacttcatattcctttctgagcttattttaggcgaataagcaaattttcttcactctgtggctggtcaaaacccaatgttttttcacctgaaaccagttttgtaaggactgccccaaagctattaacatttctctcaaggttcttgtgtgtaagtattcttgatccaagtaaacgaaagtgcttagtacttactagtgttgttagtagttctttgtctcctctttattgctccaactgagttatttatactcatccagagtcagattattccactagcaatatcatttctcatttctcttatctcttttcacaaaaaggctctcaattagataaggccaaagatctcatcaatcacgagcatctctgatacgattgatgtatcaagaagaatgtgaatgagagaaagcaaaagaagacacgtgcaagtgaggaggcacgtgagaagaaacttgcttgaagaagaagatatttttaggatctaaaaatatcttgaacaaactcagttcgagtataaataatggctctgaatgtttagagaggtttatgttgtttgttgttgaatggtatgagagacttaagagcagagctagtgatgtgctagtctctctcgtatggtgtattgagagctgagctagtgatgtgctagtctctctcgtgtttggtgtgttagtgagtactggtttggttaaggaataaaggtatcgatattgaaaacttaacaatctcgaaacacttgtaaattgaagaaacctctcaaagtctacaaaaatgctactgagagtgaaatcaatatcagaagaaacaacaaccattttccactgattaaaagataagtttttaatataccttttgaacagacaagactgatctatcgtgctcttcattttcaaggtgagattttgtagaaaacgaaaggcataacacgttagaaacagatcgatcatatccaattaaaattgcaagattcttagataaatggtacaagaaatctaaaagaaacctgcactcgctagacatctagattcagatgcaaaacaaagcgcaaaagtaagagcaaacgtagttatcggaggatccaagtctcttcaagatgataggaaaaatgcaacgcaactcacaatagctgcaaaatggacgagatgcactattattgagcaccacctcatatgatttttcccaagggtttattgtgcttcttggcatgagcaatgaaagggctccgaccacacactctatatgcaaactagcctggtagtctttacacgtgtagaaccatatctctggattggtttctttttcacaaatatcacaccaatatttaccactagccttttcgccatagcatagtgagagaggatggtcgtcaactctatgctttaccacttgtggaaaagttgcgcatttgaagcatatggcaaatctgcaatcatcttcaatgcatcctagcacatcatagaaaccatttttgcagccattgcaaatcttaatccctccatctggtaaagtgtgatataagggatgatcgggatgactcggatgaagaaatggctcagcaattgaaccgcaccgaacatcgaatgtgatgtttccttgatggtatctgaaaccattggaccatctatcacaagcataacacctaaagggttcagcttcgtttataacaagagtaagacgttcattgtgtagcacatgccatttcattctacgaaatccagcgcagttttggtggagaatgaagtcacaatccatacagccgtaaaaggactggagacagatgggatgggtgcatgcactgcaccacttgttgtcgtcacaaagaacaccattaacatggagtcgtaggtaatgctctttgtggctgaaatgttgtattgtgttttcatctattaccacatatggttgtatatcttctgtttcttcgggtactccttcaagctctttcccattccacacatcttttctagtagcacatttagaatgaacgacatagccatgacacctctgacaagaaaagcctccacaagtccaatccaccttctggtgacaaactccacatacagacttgacaacaccaagaacagatgttcgagaaacacggtgatcatgccgattaatgtttataacgcgtggaaggtcaagacagtcttgatgaatcataaaaccacattgaaaacatacataagggcttcgatctcccttcagcccacaagcattacatgtgaaagaatcgagccttgggagaagggtgagttggtggtcatgagctttcaaattcagaagagattgttgtggtggatttaaaacacatcgcatatccaaggtgaagttacacgaagaacagtgataaaacaatctatcaccaatatatcttccgcaaagacgacattttctgtcagaatagtccggtaatttacctcttacgagcttaagagggtgtaaggagtggtaaaaatggtttacctctaacgggagatttgactctgatgggcgccatgcgcaatcaacatggaatgctaaatcacattcttgacatttgtaagaaaactcataagaaagtttcccacatttatccccacagtcgatataattcggcttcttgtaaaggttgagcttgtggtgatgcgtctcggaaatgtcaataacttgtggtggtggatacttggcacaatacatatgcacgttgaagttacagatctcacaattatagaatagactcttgatagagatgccacataagttacagttacgtgtatgacctggtttacgtagaagctgaagagcgtgacttgggtgagatggatgctcgatatattcggaggacctatcgccacagctcttgtggacgaaaaaatcgcaggttttgcaatagtagccatcactgatagcttcaaaacgtctacaacaatcacctttcctcatatcattccaaggcaacatatgatgcttgtggatcaacggcagtgacactccctcagaatccatggtcaaaaattggatctgaaatctcaaaactcaaaaatcttctctcggtaatctcaacgatcgatgctcttataaaattaatcggaataaatataaatggaagaagaggtctctcgtcactaatgagaggaaaaggccattgggctagaggttaaccaagcccaaaccgaaacataatctaaacaaacctaagttcagttatctataatatcggtttagtttagattatgtttcggtttgagcaatttcatttcggttagagtcagtttaattcggtttgtttttcaaaaccatttcttcaaacaattccttcaatttttttgtatggataaaattggaaaatgtttgtcttagcgatatcttctccttcaacgactctcatcaaaccattaaaacgaaatgggccaaaccggtcaccggttcgaaaaatcctttgcctgagccagaggaagcagagcaaaaccagtaccggcaaatcttggatcgtcccagtaagtctctctctttttggttcaggcttcgtcttgggtcctcttctcgatggtatccactcacgtgtcgatctcgtggtttaccaaaacggagcttttcaaatcggtccccttcatacaaacatctgggtaagatcacaaacccacaactttgaaaaacctttcacaaaaacagaatctttttttttatcttgcaatgtgttgtttttcaggtaccgttcttgcttggcttattttactgtacagtaggtttactacaactcctattggatgagacaacctctgcaagtcctccacgtggtagcctggacaaaaccgtaatttcactcttgtgagtatgtactatgtagtaatctagcttgttgtgtacttgtgtatgacaattttgaggacagtggaagtgaaacaaaactctatatggttttggtgaatgaaacagagcattgatgttcttcttagagctaagtgctgaaatgtacaaagctggagtttcagacaacatagaagcttacattctatttgccttagcagaatttatttggttctctttggatagaacttggatttgcttcaccattgccactctccttggtgtcgcctgtcctttagccgaaatccccatcatgcagtaagtaaaccgtgcccttcaacaaccatctctttgttttttaacagaatttaatctaaagattgtcataacctggtttaacagattcttccatctgtggtactatccagaagcaaacatagaaatctttggccaggtaataagtgtttatacagacatcatcaaacaaaaacatacacatgactctgtttctttcttgttttgtttgctggtgaagggactggttacgtggacaacaacttgctactttgtctacacaccgttcttgatcaacctggcaagatggctaaggacagttatggagaggacgactattgaagtggacattagctcaaacaaagagcaataatgtttttacataatatagtggctttcttcatgctttctagcttgtaaaggttacattagatatgtccttaaacttttctttaatcgctgcctgtattcccattccaatcgactccggtccaacatattttacaacgcagtcctcgccttcaaccgataaaacttcaacacttccgccatagttcttgatagctggcctcagtatatctagatgagcattcactgcctgcaagtttgcaacccaaaaccagtcaaaggcaaacacagaagaagatatcaacgcgaatttcttaaaaagaagcctcactcacctccacggttatctgttttacttcttcatcaaaaacttgtcgaatatctttcaatgcatctccaaacttttccttgagtaccctctctattcccattgtcatagttgttgaagaacttggacagctggtacatgctcctaaacatacaacacaattcaacataagctcgattacataacatgagagcactattgctgctgcagatgatctctctgcactctaaaaaggaaaaaggctagagatttggaccaaaactatagtctacaagatattataccaagaacagtaatcagccaaactaaagttgtcatgtctcaagctcgaatctagagctctatagagaatagaaaacctaagactggtcagttatagattccaacaactcaaaccccaaaaagtttctatcttgtcgaacgaaatcagcagaacctaactccaatattctgaatttttgtatatgaaatcaaaacgaagactaaccttggagcttaagagagactaccccatcttcaacggagacaacgtcgacgtttccaccatcagagatcaagaacggtctaacatcctcaagcaccaaatcaacgttttgaggcgtcaaatcaaaagtctgagctgaatataaacctgaagatacaccagatgctaaaggtgatatcttttctccttgactcgaaccacttatcgcagatcggtgaaaaatcgccgttctagagatatgtctgcgtttattcgcaaacaagacgaaactcgggttttgatcagagattacaggaaacccattcctcgtcgaagatgatttaaccagaattctgaagcttccacttatggaagtcgcgagagaagccatcatcgttcgataatttgatccgttaaccaaaacaatcagaagcacgataaagaagaatcaataaattgcggaatagtccttaaaattaatgagttttttaattaaaggatcagatcagaaaatgtaaacagtggacccaacaaatgggccgatcgatataaatggcttttactatgacgacccaatccatttaaacgaacggagacacgtgtcggttaccaattttttcgttctcctttaagtgagtgagtttgacttttcttttatgttggatcaatcaattaaatccatatttgttttataagactttgcttcttccaaacacaacagttgcgacagtgatggccacaccacccaccacagacatatttgattctgtccaattccatacgggactaacacaaatgatttctgctgtacaactttaattttcttttaagacgaaatataataacatatcattcattattacacatacaaaaagtgtaataattgacttaaaagtctatatcattttgtacttttgtaactgatcattagaaattttataactcaagtgtcgattgactaacttttttatcgagtacggtatattaagaattgatttttgttcacttcacatgcaagctcacatggtttctactagagcctaggccctagcgaacgtaaacgaataactttacgttttgatatatagaatatatgtattttgaccaacgaatatgccatagttatataagagtaaataaacttttagttgacaaagaaaaactaaactataggtcacatttataaccaaccagctattagcctattatatatacaaggccattcatgtttgtattcatgatttacaataagtttggttacattatttgggctagaccgttaaaaacatttatgatgcatgtgccgacgaaaacaatatatagaaatttaatagaaactttcaagttgtccgaattaatatagatgattcgttacattatttgtggaccattgttttatatatgcactagaattgcatgaaaggcaaaattgtctgacaaagattttggatatgatatagaacatatgtgtacattaccaagaaaaaaagattgtagttacatttacgtagacattattaataaacaaatgaaataatcgattggttacttacatacccaaagaaccgaactcatcactcactcatcatcctaaaacaaattttaatttttcttaactactccattattaccggccaagatcaaatacttgtcttttctagtgagacttgtgcactcgaaatccaacgccttcccaatatcactctgaacattgttggccacctcaaacttcaactttccatcaggatcttggcacgtggcaccggagacagggtcgagaaattggatggtgtaggtaggataaggatccaagaggaagaaaagcgggtcaagtgccttaagaccactcgccgttgtaccgtagaagaaggtcacgtgtaccgtcacagccacgggaacgatgacatcactaacctcggtgaacaaagggctaaacctaagcaggtaaggttctctacaagtggttccttcaggacaaacaacgagatctccttcggttaacaatttctccatggcttgaccgtcgctcacccgatcacgggtcagtctcaccgtcttgatcggagccaaaatctcagataccctactcaaactatacgttacagttttgatgtttttctttctcaaagcgaatgcaacatagagagggtccaataaagtcctatggttacaaacaaagagacaacctttgcgttgacttggtttttgtttttgagatgaaacgtagtcgttagtgacggttagtctgcaaccggaaaaggcgaggatcgggattgataaagagtaagggatgcaaagagagacgaagagtctggctgctgcggctgcggctgcgaaaggaccccacatgaacaagaccaaagtgttcattagggttggtttgatcgcgagacggccatcatggaaaatcaatggtttagggtactggcttcgtggtagggtttgccagcttcgcttgtctgatttcttcacgaaataaatttcctattagagagaaaaggacaagaaaatcagttgagtataacatgaaaacaatgaatgaaaatacctaacaaaaatcaattacaggtattgagattcaactcgacgagatatattcattgtcatgactaataactatgcacacaggatctgtcgtcgtttcttattcgtatttaatgatataggccttgatttgttctttccttttgttttccctttttatatatgttgttaatatttttgacgttatgttgttaatatttcatattcgcaatcaagcaagttgtccgtgtttcatcaccgtcactactatcacaatttaatatgctatgttgctttttactaattatcggtcatcatatatataaaaactgtaacaagtcataatatagatatcaacatatatggagtagtttctttttttggctgcttcaatatttagtagttaaaacattctcgtttagtatttccaaaaaatctcttaccaaatataattaaaaactgtataatctgtaaacgtaaacgcaaacaaaataatgataaaagagactgacctggcaaaactgagagaatagatatcggtgaagagatgtattgaaggaagtgatgccaataacacgaccggtgtttagtctctctttacgaactaactcatcaaagacaagatcatgtttggttttatcctccatgatacctagataataacctccaacgactttcatttctctcccgaccacaacgtcaatctccaagtaatctctcaagaacccttcgatcataacttgaggaagatcatcactcactccgattttcttccctcctctcttcaacacttcgaacatctcgagtccgacatcttctagaaagtatttaggcaaaaccgctctccccgctcgaaaaccttcttttttgatcccgaagaagctcaccattaccatcactttgacacccatctcatggctcatcaagcttatcaatggatagagaatgaagaggagaaatgaccttattacgcctcccgcctcaaatgctactaacatgaagtaagggaagagagagtcggatttgagaagagctccttctacgttgaagatcaatgtgtggcgtgataggtcggattggaggagagaagaagggccattttggtattttggtttagagttccgatatcgccggaggataaaccggtagaatagaaagacaagagcttggaatattgaaatcttggcggacatgtttggattttgcagaaagcttttctttttacttttcttttccttccttcgtgtattttctttgtttggtttcagacaatgcatgttggagagcaattgatggggtatttatataacaaaaccaagacgaaattacccatgagcgtgttgcaaatttacaagaaattgccattgatcgttaacgtacagcttgcatgattatgcattaaatgagattaccaagtgaacatgtaatagtatatttgaaaagtatacgcgtgtatgactcgtagaccaaaaattttagtcgaaagagagtatgagtcaaagcttttgtttaatatttaagtagaattatttgtggtgttaaataaaataacacgagtcaaagttagtgtataatcggagattaacacacataactaatcaagtacgtgattacaagtcttgttccacttgttaatcataattttttaacaaagcgaaactgaaaccgtcattacatatatgtactttaacagtcataaccaaacaataaaatatatgtgatggagatccgtttaatattgcgtattattctcctgtaaaggttattcttacttttatttcgaattgattactattatatgtacaagttgggatgtttcattaaatggttgaaagtcaagaacttgtatttgttgtttgatatgacaagaactttttttttgttaaagggtttttgatatgacaagaacttacgtttaggaaactaaaactaatgatagagaaatcatacgactagtacacatatattgaatcattaattgatgtgttataggaccaagtcgagtttttgttttgtattatcttctctcggttgtctacgagaacgaaattaaaagggtccacgtacctacaaattagattatctcgagtcttgataccaaaacaagaaagaaagaaaaactgtcctacaaatattaaatttatggaaaataatcattttgttggcccaaaataattgttaaattaaatgaatgtagttcataattgttaagaatttaagatccaattaatattggacagcttataactaatcactctatgcacctcctaaactaattccaaattaaattaaaaccaacatgaccatacatgtttgcaatctttggtatggatggtcttttgagcaaaatctctttttggtaaggacatactacaaaaataaaaattaaaaatggtgactgaatgttgaaaatggaaagattatcttaataaaaacagttaaacgcattgaatgctaatgagtcgccgaccacgtttacaaactgtgtggtgtggtgtggcgtggacgtgggatggggggatctctttctagcttaagtttatttctattcatttttgaactttggtcaaatggtaaaatattcatatcattcttttgtacttcgaaatataaagttaactgtcggtgttactaaattaatacacatctccaagaatttgcattgtgtacgtcattgtactttgttaagaaagatttcaatagaacgaatcccaaaccgagacgacttagagagaaaaaaaaaaacagattgcttaaatatcctaaaataaggtgaatcgaattgaatgtttgattatttttcgttagcttaagctcaaatatatacacaaactatttatcgagatttatttggtcatatttggatcacacatcagagcttatgttcacacaaagaatcgaatacaatcttatcttctaataagatcaaacttaagtatgttcacgctaagaattttgtaaaatccaaacttagatatatagtaggacagaaaaactaagtgtccgatccctgtcgtacataaatctaaatacagtctgtaactgatcatgtgatgtataaatgtttgattgtcaaaactcaaaacccaaacacaaaatgatacttttttggggcaaacccttaggaaatgatacataagaagaaagaaactcttagaccatcctcgttcaacattcaacaacttttcatgatgtctttcacataaaataatattaaaggtaaagctcaaatgtctctaggaagatatagagtttgaatggtaatacggtacaactttaacagttatcaatcacaaaaactttatcaaaagcgttacaaaaagttttactctcagttttttggtacaaattttttatacagttctttctaacagctttgcactattccgaaaaacctaacatctccagctaacaggtaaaaaacttgtacagcttttgattaccaatcagacccataatttttattctaaaaatatctgtatttctctcttttttttttttcttttatatttagaaataaccatttaaagacactcataaaaatgataaatatggatgctcttaggaaataaaacaaataaacgttaaaaagaaaaaacagagagaatggaggaaaataatagaaagaaactgaaaaaagagttgacttagaaatagcatgggaaagcttgaagttgaagatgaaaagcttacaaaataaataaattaaacttcgactatcgatcattcgatcagttgattttaatgcatgatccgcgttaagtggatgtaacaacatgcaatgtacgtacattgctttttcatatataattaaggttgtaccttgacaaaaaaaaattgaacaacttagtttttgtctttttggaatatgaaaaaatttcacaacatgggtgaaatttaattcaatttttgtattttctttcatatgtccatagtccttatccagtatcaaaagttcaaaaccaccccaaaaagaagaacaacaataatagatgtattgaaaacgacgatcgagagatgctacatatacggatgagaattaaagagatacacatacgaagtattcaatgcgaatgcaaccgaggtggcgaggtgatacgatttaaattgaactaagtcgatttgaatccaaataaaatttagtttggtttatgagattttaatttagtttttcaaccaaaaaaactgaaaagctagagtaattaatatagggccaattaatatatgctagagaagaaaatctagtttttttttttcattttttaattaagagttgttttgtggactctgctataaatatgaatgaagaaatgaatgtcggactatcaaaaaagtccaacctaaaatcagggtgaaaattttcatcatactgtatatgttttgcaattgggtgtttaatactccatagtccatatgtttatatttagctgtctaaggttttgacttttgacacaaaaattaataaatcaatttattttctgtttttattttattttattttaaatatgtttaattatctatttaaagacaatttaaccaatgaaacaacaaactgcagaattttaaaaatcaaaaacaataaaataataagaaattttgctttgaaatttgaaaacaacaaagaaattgaaacattattttttggcttaaagaacaattagtaaaaataaagggagtatgtttcatcaaaaaatgggcaaaactctttttgcttctatgtttttttttttttggccatatgattaaatcattagatttctatcttgtagcactaaacttttgtccgtttctaatgaaatatttacttttttagcaaaaaaatatagatatttacattcttattcgagtagttggtaatacttcgttggtacgtttgctctcatctttcgagttcttttttttaacaaaaatataacaacaaatttttatcctttttccattttaaatgtacaatttaacattttacttttacagaattactgaccttacactttttctaattatcaaacatcaattaacggataatttgatacaaaaacttcatacacaactgcattttatcctatgtaaattatattttttatatattctttatcatttggcttatttgagtctatctaaatattagttagaaaaaaaaaaacaatttgtttaaacggagagaaaagaaacgtggttaattgtgaaggcgccgttaaacgactgctaatgctatctttttcattattgtcataaaaactaacttatcaggaaagattagtattttcatcaattaaaaacaaaattttcatgagtaaatacttgaattttttttatccgtaacaagaaaattattcattaactatcgttttcttcataagctttatgaaatagacataacgaagaaaaaactaagctcggatctttgattagtcacataatatcacaaacctatcttgatattcttttgcttataatgttgattttctttgcctttaaaacatgaaagatcaatcaaagatgtgatgtgagcatcatcatcattatcaatcatcaataatcattatcttttcccttaatttcttcagataatgatgcctataaaaagcatgaaacaatcaatgaaagcctagccatcatcatcaatcaccatcagcatcattgtttaggtcataagagtcagtcgctgtacaaacctaacctcgaagctaaggacaaaaaaatgagcagattcatccataagaatatttacaagaagagtaacagagagacaaacatgtgaacacaaacagatcaaaggaacaatagagtgatgtcaagaatttacgaacaaacaaaaacataagtagtgtttttggttacattttacaagaatccaaagagaagaaactcatctggtaacttctcttgtgttttcttcattgtctgcacctgagactctcttatacctgaaattttacacacaacaacatcagtaagacgaaattgctctgtttatatctgtatagaagaaactgttctctctgctccgtgcagcgtaatggaaaggaggaagatttatctcacctgaaagaagtagtagggctgggatcgattctctcacgaggagcaaactcattgtagaactgaacagagaccatacggttattagctgaattatttggtgcaggtgaattgtcagaattcaaactcgcattgcttgtgaagaaccctgcaaaagagaaagacaattcagggagctttatgaaacaacaggagctttgatcatttaacaagcgcgagcaaacacatagaacctaaaagaaagacctaatagaacatctgaccaaagatcttcaaagctttgaacatttaacaagcgcgagcaaacacatagaaactaaaagaaagacctaatagaacatttgaccaaagatcttgattccaatggtgattaccttgaaagattaagaagacgaagaatataaccgtcactatcatggcgaaaatgctactgcagggagacgaggactttgctgctttcaatcttctgagtgttttcatccgttcaatccgagcacgctttctcatagcaagctccgtgatttccctcatcaacttctggtcattagcactcagtaacggaccttttggaggcctcggtggctttgaaggttttctcgtcttcttaaacttatcattatcaaacttcatatccgaaagatccaaactttgactgcttctttctctccgctttccctctcccattaaagggtctactagatcatcagcactcttttcagacccatcaaaactcaaacgtccactccaaacatgattcaaaacattctctgaatccccttccgctgaaacaagattcgtcgttatctcttgtgtctcattgaatctaccatcttcaatatctacatcaagatcttcttcttctcctgaaacaatttgatccatcccgcacaacacacaaaagctgatcaaacccttaaatttcccctgaaataataatcctctacagaagcttcctcaactcaaaagacttgctcttttaactccttgcgtcctcctaacatatgcacaagataataataccaaatacgattaacataacaacaaaactgcaaagaaacataaacaaattttgttacccacaaatgctaacataaatagctaaaaccctaacatcaccaaatcacctaagccttttgaaaacaccaaacaaccagtgataccttaaaatcatatttcgtaaatcctctaatttctggaacaagctaaacgagaaaaagcttcgaactttatttatattttctccaattcaaagaacgaatgcaacataaatatacctatttatgaaacccagaatctagaaagaagacctctaatacatcaaagatttcaactttataacgaaagtcgagaaggaaacagagaaattcttcagacaacaaacaaacaaccccagaagaaacctttaaaaaactcacgaattcaagcataatagctggtaatgtcgaaaacccttgatgctgtgatgtacgaggaagacaaaaagaaagaactttgaatccaattttgggaaaggaaagagagagagagagagtgaccaacccaaaattagggttcataaaggtcaaaaattttgatttttcttttctcttttgttcgtgtcccgattaaatctggttttttttaatactaaaaataaagaaacacaacacacaagaatgtcttttggattgtaatgtcgccgaaaacaaattgaaaattggtcttctttttattattgtttttcttttttcaatggagtttttaattaagtttataattagctaatcaaaacagagaaaggaaaaaagaagaaaaattaggatattaaaacaccaatgtaccagttaattatttgttttaaagttaaccactataaatggataaagcttcttttatttttctatccatgatttattttatagaactcgaataaatcttgttcttttttcactgggcaatatgatcatgttaaagacacatgtattcatataggttagacacatgtatacatgtatgtattatacaaaaaattagccgttacggtcccattgccttgtctagaaatcaacatcatgggtcattccttcattaacattcactatgatccaaacagaaacaaacaaagttctttttaacttttggcaaaagtgattcttgtatacacatacacacacacaaaaaaaaacagcaactttctaaagagtaatactcaattgtacaaatacaactattggtaaaaattacgcataactcgaaccaatctgaccaatgatgttggaccaaacctattaaagtttactttcgttagaataatttttaataaattgaccaatgatgttgacctttttaatataatttaaaagatatttgactaaatctcaaatttaaccgacaaagaaaatccatttgatattaaaatttgtttgagaagtctccaaattgaaaagtaaaacaccaaacagaaattgacaacccaacttctgataacaaaatgcaagaaaaggaaaacgaaaaacaaaaatccaaacaaattattaaaaggtgaaagacagatgagagatgccaccagattcttcaacccaaggaacaaagaaactgagtttaccagtttcttcttcccacttaaactcagcttccttgtcgttcaagtaacacttcaccggagctgaactcgaatacgccatgaatcttccttcgcctttcacgtccactcttatgctgttatcaccagtaaccttcatgtcttggactgttccgacgcagttgaacatgttgatcaaccctagaggtgcgaatctaacccctgaacttacaagttccgtgactggcacgaaactcaacaggtcaaacgcggatggctcaagggttatcttcatcgcttctgatttcgagttcatgaaaaggatttcttcagattgttgcttgtaaaccaagtaatctccagtgtaggtcacctgagagcctgcagcttctggattctgatcccattcaatgtccgagacatgaactgttcccgaaactgtcgtgtaacattctttgtatcctttgaacctatgctcctctgggctccacccagcaccttgacagttaaatgttccaatcactcctccaaactgcaacaaatcatatggggttttaataaagttctgatctctaaacgatgaatttgatttaaaactgattaccttgttgaagttgaagatcttgaggattgactctttgtcaaacaaagggttcttgaagagcgaatctctagtgggaagagcatagtggacacaccttgggatggtaccatcaaagaaagcaagtttcttgatgagatcaaagttatgtgaggctttgccaagatggtcactgagatagacaggcccaccgcaaatggctcgagatgcggcgtggtactcggcacagacatggtctgattggaacatgtcccaatctggttgaatcatttgacccatccaaatactgttgtaagaacagtgaatcatgtgaactccttgtagccaatatactccttgtgggtcaccatatgggtcttgccaccaaaaatcatcacctgagcaaaattcaaaacttttgttaatgctcaaacactagtggaatcaaaagaaacggctttagctttatatatattaccaactctgccaatagagatttgctttgtggcaaggaagaagaactcattgcactgttgcatactcgcaatgacatcagttccattaaaattcttgatcatggattcggtcagaccatcgtagtaagctttagcaagctccactcgtcctccatgttcttctgctagtgactccaaggtctaaaaccaaacacagacacacaacattaacaacaactcctatatgtaaagaaaagccagagtatctaagacagagtaagagtaatgtaacaacttacttggaaaacatcaatcttggctcctgtaacaccaacactagcaagataagagtgcatcgagtcgtagaattcatgagctttagaaggatgaacaagaccaatcccagcttctacaaccttgtcgactgcgagatcagccatcgtagcgcctagactaggtgaaagctcaaaaggagcaaccttggccttcaaatccatcatggtttcaggcctaacaccattccaagcaccacaaagagcatgccacacatatatatcatctaaactcttaaaccttaacctcaaatcctttgtgaaagccgccatacctgagccagaaacatcatcagaacccaaagactcttctttctcaacctcatcaaacattgcattgagttcttcactcaaaatcttgatcttttcatcaagttcggtcagatcttgttccccagactccttaaccaacttccgtctcaatataatcgcctgaattcgctcggtcgctttgtagataagcatcttcggcttgagaggattgaagtgagatgcatcagatgttataaaggatccacctttatagtttctaaacttcttacactccttgaagctggtaagcctcgcagtcatttgctccccaccaagaacaagattctcagcgtctttgtctagctcatcaccatcaaagttaatactttgccatccatcatcaatgatgacaaacttcggacacaccccaccatcttcaaactccttaactccagtccaaatggttgcaggatcaacggtcaagtagcaagcatcccaagtgcaccatccaaacttatcgacgattttcggaagcttcttctcttctagaagcttgaaagtgttcatatgaacacgaagtgcactaaaagcctctttcatgaggttataggggttgtcacaaatgtgaatgtaggcaatggatttgaaagatgactcttttactttagttgagccactctctgcacaaatcaagacattacctttctcaccaggagtaagtgaagccctaaaagctccttcaatggttggtatgatggccacgtaggaatcgatctcaggaatctttagcatcacccactgagtctcggcttgaagatccgaccctgatttcccgatccaagccgtcgaccaccacattttgaaccggaaaagactgagaaactctctgtcttcgaatcttcccaaggagtttgtgagacgatcagagggtgattctttggtgaatccgagaaaccctcctttgtgagcgttggcttgaactcggaggaggattgggagaggagcatcagtggatatggagtgagatgagaatggtgtgaaagttacgttttgaggaacatcaaagaggattggagtagagtctttggcacagagagacccttcggataggttaaatgagtttggctgcaagattggcttagttattggaacaaaaagaggtttggattcgattacatcgttgattgatgacagagattcgtgaagtggagccatgagagaacagaggaagtttgaaaaacagaggaaatgaaaacagaggatggtaggtgatgaaaatgctttcttttgctttctatatatatacagagaaaatggataaaagtaattataacggaagatcctccgagtttccatacttcatatttcgtattatctaattacatttattgattacctaatcttctttgtgtattaatgagatttttacttgcatagggagatgatttcaatgtaataaatacggataatatatatatgattgtcgtaattagggaaactgatatatctttgtacgaaatactataatcgaaggatcttccgtaaatggtaaatacaaactttctatgaaactttcgagtttcgacgacgaaaagatggaagaaaaaagaagttggtgtatgatgttcttgcaagatcaagaaactactaaagaaaaagaaactttagaataatattatagttttttgagtcagtaatattaagaaacaaaatgtcatattattcacacgtagcttattcatgtctacgtgcatgtaatgtaatgctacttggcaaactatgatgctacaatgagacaaatgatcgttgttattttaattttatttttgtcatcaagaggattattttattaaattacacatacagtgatcgttattatagagtatattgagcaattggattttgaatatatatcctgcagaaaaagtaatatatttgcggagatctactcagatatctacttattattgtttgtatccgttatggaaaattagatatcgtacagacttattgggatgattattggataagacagaatatttatagtacttattatgggtgtgattggtagcatagttagttaacaacttaccatagatttaatttagcttatggtcaactaaataatgttttcaatcatgaattaagttatgtctttttgttattttaaatcaatccaaaaaagattgtatgtcttttttgtgatactcaaaaaaattaaaaaaaatcttgtattaaatcctaatgggtttacccattaaccacacattataactaacccataatcgcattgttttcattgctttaattaaacaaatgtgttgtaaaactcaaccctaatccgctaataaactagggttaattcatggttagatatagtagacaaactcgtttacttgaatttcttccttacagttgttttgatatgagatgatgtactaccttgaacacccttatggatttataatgggccttactcaaccaagtccaatacatgtccattattaagcttgttatcttatattagacttgtattaaacaaaatcaaagtttgatggactgggccgatctcaagattctcaacagcccatcaagaatacaatgtgtacacgggtaaaagggcctattttaactatgactatgtggacggtgatttttcctattcatacaatgagtgtttattttaacagttaacaaaattcaaatttactacatatactagttactaagttccaaaaccaacattaacttaaacggacgttagtcaaaccgttaaaatagcttagtcggacgacaaagcagcatttcataaccactatgtggaatagtgtttgacaaaacaacgtcgttttgcattgagttcgtccatcctaacaatcatctttttattcatcttttctcagtgaccttgtgtttctcgtcatcaattacggatttcgaagacctcatggataatctcataagaggtttgcatgagagatgtagatgatgagaatctgtagttatgagaacatcgaggactgctgaaaatcctgtaaggggtaagtgtgacatctcactttttggagagatagaaatcggttgtgttatgtctgcaactttaaatttgtaatgtgtttatatttttctaaattttaggattggagtcatacatttaaatggcttgatatgtcaatggtcgaagaaattaaggacttgattgagaaagtcgataacattgaaggagcttcaatcacattgcaaaaaggcttcaatgtttgtgaatttgagattgatactcttgcaatggagttgcgtgtgtgtgaggctgtggttgacaaggagatccgagagtgcaaaatgcagctaaagatcttgaagaactctgataattagctttggtgattatcatgtttttcttgactaaatattgagtttgtgagctagaatcagtagaattatgtatgttgtaatgtttgaggttcaagaagatgaatgtgtgtaagtgtatgagactaaatagtatttgtatgttttagaattgtgtttttatacgagagtttaaaagcaacaggctaagtagttctatttgtatttgtatgttgaatgaaaaaattgtcatatgaaagtgaaagtaacagaaacaaatcgtcattaacagaaaaatggtcataatcaagggtaacatatcgccgaaagaacaagagaccataagattgtgttacatgtcgccaaaaaacacaccaccgcattgaaaatccgaaaagtaaaatgtcctaaactgcatcataatttatgttcaagctacaaaaaccaacaaaatttggtaataaataactgaaaacaaaaatgagattgaggaaaggagaaagagaaacttgaaatctgatattagtcttgtgttgcttgacttgcatggtccttctccatctcccattgtgtttgatgtcttcttcttcttcgttggtggcaaatatttctccactcctattattgggcatttggaagccctgggtccagccatactacatctacgacaatgcattaccctccttttcctactaacctttttcttcttcgtaggagagtcatgcctccctttcttcctctttggttttggctttctaccttttatgtttttcatatgttctaccaaattccgaggtgggaatattacttcaccagatttattccagaaacacataccattgacttgatttattgagtcgctgtaaatttggtgttgccttgaattgagaagccaactggagatgtaatcttcataattaagcttattatctatgatgatacgtaagacatggcgacatggcactctatttcatttcccttttcagacaaacacaagtttttaatctcatgttcgctgaataagaggcaccagattcacgaactttttttctgatcccggaacgaccttggaacaaccttacagaaattaagcttttccctctccatctctatcatctcaactattttagatggtagttttcctaaatggttatctgtcttggtttttctcattttaatacgcaccatggttcttctccttatcgtctccagcatctcaaccattgggatataccttgtaggatctatgacattgttgaatgattcagatattttgttttgcacatctacacaaaaagaggttggtgtgaaaaacgcaaggctacaattcttgggattcttctccatgatggctgcataaaaacgcatgtcatagatcttaagtcttaagcaactccaaattttagcatcatactaagttttggtgtaaccttctgttacttgccaaaacagcttctttaaaaccttgatgaggaaacatcttcttcaagttcccatagatatgcctagcacacatcctatgttcaacatgaggtaatacgatttccacagcattaagcaagccctgaaagttaacaacttatggttagtaaatccgcagcattatacttttcaataaactaacacaatggagattgaagatgatatatcgtttgtctatcagattttttttaaattatttttatggtttttaaccaaactaaatttaaaccaaaatcttagtaaaaattaaaaccaaatgggattttctacaaatttataaccaaaacaaaccgtttagttcgatttgctacagtttggtattttcgtttttggattttttgctcatccctactctcaaagggttctcttcatattttattaattaaatttcaaaaaaaaaagataagagagctctgtgtttttttctgattttttgtactccaatggtaggttctttgagtggagttctctcgaaaaaaaatattaatataaaattattttattaatttcatacaacttaataattattttaaagcataaaatattaaacatacattattttgaaatattttaaaatatatgtggaaaaaaacagaatgacgatcagttgttctgttgattgttgcgaaactttttccatatatgctctaccaaatcacttttcaattgcagatgcatctctcgatcacgaactttatttcgaatgccaataaaatctctgacatttgtaggcatacctgtagaatacgataaatcgacttgtgaagttcggtttgcttcaacgtgtatgaattcctcaacatcaaattgagtatacccatctcgttcgtcttcaacaatcatattgtgcaatatgatacatgcccgcataatatttcctattttttccttatcccaaataagagctgggtttttaataatgtgaaaccgagcttacaatactccaaatgcacgctcgacatctttacgaacggcttcttgatatgatgcaaataaagatgattttcgaccttgtggaagtcgaatagattgtataaaagtcgcccatttcggttatataccatctgtgagatagtaagccaaattatactctcgtccgttgacctcataacgcacatttggagctcgaccttgtaaaatttcatcaaaaactggtgatcgatcaagaatattgatatcgtttaaggtacctagaggtccaaaaaacgcgtgtcatatccagagatcttgtgatgcgactgcctctaaaacaatagttggttttccagagcctcgcgtatactggcctttccaagaggtggggcaattcttccactcccaatgcatacagtcgatgcttccaatcatccctgaaaatccgcgaatctctctaatatcgagcaacctttgtagatctgcttgtgtaggtgttcttagatattcatcaccaaacaaagaaataattccttcggtaaaattctctaagcatgaaagagcagtggtttcaccgatgcggaggtattcgtcaagtgaatcggccgcacaaccatatgcaagtagacgaatcgttgtcgtacatttttgtataggagagtgccctaaccttcctatagcatctcttcgatattgaaagaacagaaattcacttgaaagtcgatcaacaatacgcatgaacaaggatttgttcattcgaaatcggcgtcgaaaaacatgaggtgggaatcttggattatcactaaaataatcgttgaataagagggtgtgtccttcttctcgttttctctcaataaaggctcgtttccgtgttttttttgtgcctcatcgccattagccaaatcaacaaacatattatcgaattgttgatctagtaattggtcaaaactttgttccatggcatcatcgaaaggagtacgggatgaagaagccatattgtttgatgtagtataaaataaaaataagcaaagaagtttaaagattgtaaataagaagaagattgtgtattgttgatgttcttgaggtagtagtttaaatgagaagaagaagattgtgaataagaagaagattgtggattgttggtgttcttgaggtagtagtttaaatgagaagaagaatattgtgaataagaagaagattgtggattgttgatgttcttgaggtagtagtttaaatgagaagaataggtttgtgaataagaagaagattgtaaataagaagaataggtttgtgaataagaaaaagattgtgaattgaaatgaagaacatcaattatatataggatcagaaccaaaaaaagagaacaacaacttgtgatcgaatatacatgaccatacaaagctaaaataagacaacttgtggtccaaatacaaagttaaataaaagacaaggtgtgtaagaaaatacaaagctaaaaagatacatgtggtggaaacatacaaagctaaaaaaaagacaacaaagcaaacgaatcatatgtctcttttggcatcaagtggaacatgagttgcaagttacgtgtctttgtctatctttgtctccaaccggtgatgataaactgcaaaagttaacaacaaagtcttgtgacatataaggccaaatatgacttgtgacataagataatagacaaaacaatatcataagaagcattaaagcaatatcatacataacattaagacaatatcatacataagcaaagtgatttgcaataaaaacagacaaagcaaattaaacatgccattgttgtgacattgaaacaaatcttagaagtacttagaaagaaattaaacattttaaagaggttcggtacttatgaaaacaactcctcaattagcttcttcttaagaaccaagtcacactctgaaagaggttcggttcttgaaagaagactttcaagcatttggtttttgctttgcttatccttacgatcccaatctctttccttaagatcccacaaagaagtcaagtgttcaactgaattcacttcttctcctttaactgttggtgtcttcttagcttttgctttcgcagccttcacacccggaggccgacgcattacatcatcatcttcaagatcaataggttgtgaacttgcagcttgagtaccaactcgaaccttccttcttttcgcaattcctttccctttaggagcattagatattaaccacttttggtcatgtcgcagcagcctccatgcatgatctagactgaacttctttttcatatcattttcaaagagctcatttgcaaagagcatgacatcattctcggtttgcccacttgctttttggtttgtggttgtggcataacagcccacaaacttcatgactagctcattcatctttgcccatctttgcttacattgagccgacgccctctttggaacaccgtcaaggtctggatttgctgcaacataagaagcaatcctcttccaaaaagctggagctttttgctcatttccgaccacggggtctttgctagtgtttaaccaggcactaatgagtactatatcctctttagctgcccatttctttcttgcaatggccaccctagaagcataacgttcctcatgactttcttgacaacgttgagttccaaaaacgggaatttctgaggatccaacctcatattgattggtctcattgttgtggctttcttgttgactgtgcaacaagtccataaaaccggaagcttgagaaaatggattgtaagaatccattttcaagttgctttggatgtttagagtagaaagaagggtagctatgtgtttaaagaagagaaaagttaactgagaagctatgtgtttaaggaatagaatggtttaagttagtaactttggatgtttgggttatatataaactgcttcgacattaataatttcagttaaggcaaaaagatttttaaaagcaaaagttatggttattagtcgtaatcaacttcaagcacactattatggttattagttgaaatcaacttcaagcaaacatttatcactgtctaaagctcacatttatcactatcaaaagctttatcatttgtcaaaaaccatttatcacagtgaaaacctatgtaacgtctatccaccaaaaaataacaatcaatgctatataacaattaatcaagtacatatttactttcaatcaaacatttatcactgtctaaagctcacatttatcactatcaaaagctttatcatttctcaaaaaccatttatcacagtgaaaagctatgtaacgtctatccaccaaaaaaataacaatcaatgctatataacaatcaatcaagtacatatttaccttcattgaagtgcatagacgaattcctttacagtttctccttaactcacaaccacttgcttatccgccattaacactcaccaaaagcatagagaaaaaaaacaacaattagcatttacagttaactttccaatttgattcaatcacagaaacagatattaaacaacaaagtttacatttactaaacccaatcaatcacatctacatatacattaaaaagaaaatcaaactatcgaacgatctattaccatacaaatctatacaacatgtctccaaaacgatctatgaccatacaaaactatagaaaatgcttcaagatatatcaaaaaataccctaatcttgctacaaacgaagaaccctaatttttaaaaacagaaccctaaattttcttcaattccaaaaccctaatttttttgattaaaccaccaaatacaacatctaatcacgtaataaagattagaattgattcatacctaatttggggaaggcgtcggcgataactctccgaatccaatttgctatttttcgatttaagcaaacttccgccgatgtgaacatcgtttgttgccttgatgaatccatcgttgaaagtctcagataacatagcgaaatacaaacaatcaccggcgttaattgttctggtttttcaaagattgagcaatttttcttttgtcaatgtcgcgaagagaaagataaggagagagagaaaagaatttgttcgggcaaaacaaaggaaatgaaatcaatcatttttattttttcttttgtttaaagaagataaccaatgaatgtatgccacgtgttcgcctctctcattccctcataaactctctccatagaaacgtttctctagtttttctttcagtttgattaaattttaatcaaaataatcgaaatttgaattaaattttaaacattttaatcgaaatttcaacataacccagcgttggaaatgaccttagtctttagggtgtctttaccaatgatgttttgaaatgtagtttggccatcccaaatattgaacatgagagttcttgagtattgttataaatttatatctgatgaaagaaatgaagaaaacaattgtttttccctcctacgttattttacattttgatagtatttaactaatataagaaatttaagatttaattacattatcatgtaaaaagcaagtaatttgtcggaatccattaaaaatctgttggttattttgttgacgaaaattacccacaaccaatcctctgctatttgcgatcgaattagtgatggttacctcatttcttgaaacatgagaaataattaaaaagcaaggaaaatggacatcaatatattgtcattgatttgaagtatatttttttcatcattagttatatcaatctctcttttactgtttatcaatctatggaaatagttttattcattattatatactagtacaaggaaaatatgataaaagttatagcaacgagtgtgcatgcaagtcactataaagaggcaacgtgcatggagcactaaattgttaacagtacacactgccgttttatatttagcgtcgtcggtttcccacgccaccgccaccagcagctcctcctcctgtactacccccggctccaactcctacaccaacatttgctccgcctccaacacccccaccagctcctcctccggctcctgctccgccactagctccaccactaccacgtcccgctccaccaacacctccgccaactgcaccaccaacggctcctctaacaccaccaccaacacctccgccgactccacctcctacaccacccccagcaccgcctcctataccccctcctccaccaactcctacacctcctcccgctccaacactaccaccagttccgccaccagctccaccactaccacgtccccctccaccaacactgccgcctccacctcctccaacagcgccaccaacggctcctccaacagcaccacccacacctccgccgactccacctcctacaccaccaccaacaccgcctcccgctccaacactaccaccagctcccccagcgcctccaactccgccactagctccaccactagctccaccactagctccaccactagctccgccactagctccaccactagctccgccactaccacgtcctcctccaccaacactgccgcctccacctccgccaacagcgccaccaacggctcctccaacagcaccacccacacctccgccgactccacctcctacaccaccaccaacaccgcctcctacacctcctcccgctccaacactaccgccagctccgccactagctccaccactagctccgccactagctccaccactaccacgtccccctccaccaacactgccgcctccacctcctccaacagcgccaccaactgctcctccaacagcaccacccacacttccgccgactccacctcctacaccaccaccaacaccgcctcctaaacctcctcccgctccaacattaccgccagctccgccactggctccaactccaccactaccacgtccccctccaccaacactaccacctccacttccaccagctcctcctccaacgccaacaccaccactagctccgccactaccacgtcctccggcaccaacagtgccaccaccaccactagctccgccactaccacgtcctccggcaccaacagtgccaccaccaccactaccaattcctcctccggctcctacgcttccaccagctcctcctccggctcctacaccaccaccaactcctcctccagctccaccaccacttttaccgccacggccttttccacctccaccaactcctcctgatgcaccacctccaatggcaccgcctgccccaccaccaattcctcccccggctcctacgcttccaccagctcctcctccggctcctacaccaccaccaactcctcctccagctccgccaccacctttacggccacggccttttccacctccaccagctcctcctgatgcaccacctccaatggcaccgcctgctccaccaccaactcctcccccagctccaacaccaccactaccgcctatacctcctcctccacctcctccacctccgactccaatgccaccgctagcaccacctccggcacctgcaccaacaccaacacttcctcttccatgtttatgacgtcggcttctggcaatatcatgaccagtacctgacaattttcccaagacttgcgtcgacaacaacaacaccaccacacacgccactacccaaccccttctcacgaattttcccatatttactcttattctgatctctttctttctttaaaatacacacacaagctcactcagacaaatagatagattcccaaacaatgtaagctcgatcagtactagctattagttgattacgttaccttggcaagaaaccctatttatagccaaaaccaatcaacaggcacacacatacgtgtcctctactcacaggttcctgaaaaagatgaaagcccactcaagaatcttaaatctcgaagacgcgtccagactccttggtcgacatgaatacgtaacattagtcttctctaagcactaagaaatttgctaaagctgataataatgatcacttataagaaaactcatgcactcttactatattcataattcatgtaatagttgttttgcttagtggaatataatacgtgcctcttttcatctctcgccatacgcactttcataaagcattgtgctatttttagtgccgttttttggatatttatctttcgcaaaggtcaaaaggattttacttactaatcacaaacgcgtggcacgcaaggttctcacattacaattaaactgcgtttttaagacgtaagttttcataatgaaatatatttaagacgaaattattaaatttaccagagtttaataaattattgacatacgaagtcaccaagattatctaaaaatttataaagataagttggaaaatatacactttttctacaaataatttgtaaagtatatagtttttttagaattatgagaaataaacacttttctctttcctctctaatataactttttgtctaatagagattttagtaaatgacttatataacattttgttattttgttatttagtaagataaagacaaaactcaagtcaaatcctactttttatttttacttaaatatttttactttatttgatgatatttctttataaaaatttatcacataatcatattagtttttaaaatttttatgtgaatttaagaagtctaattttgctatttcaaaaatatgtagcaatttttatttaaactcagccgacgatgtacgtgatattgttaaaattggtctactaatggtaacaataacgtaaaaattaatataattactgatgtagaaaatgatacactgagtataacagtgtacaaaatgatgtccatagatgatgaaaaatatggtgtacataatcgtacacctttaaaaatctatgagacagtgtactaacattggtgtacgagatgatgtacaccactaattgaaataatgatttatacattctctataagtgtacaccaagttttgtacactttgtctaccaatcttgtatgttatcatttaaaagttgtatatatcattctatccaccaatcgtcattatagtttcaatcattttgtacaccattaagagtaacttaattatgtacaccatcatgtacaccattatattgaataataatatttggtttatactatcattatgtttgtaaaatattaaaaataatattacttatattaataagtataagagaagtcggtgatgatttatgaaatatcggtgtacacacttgtacaccaacgaataatggttagtgtacaaaacgatgttttaaatgtttgtgcattataatgatgacagataaatagtgtaaaagtcaatgtaattttttagaaaaaagaatatttctttttttttaagtatttaagaatactaaaataaaaaaataaaaagataaagacaaacaaaataaagtaaaaatggttcctcgtataatttttattctctctcaagataaaaggtattttactatttgatatgtattttgtcttttagtctattagacaaattttctatctcacaaaaagcaaaaaagtgtctatctctctaattttaaaaaaaaaattacctactttacaaattatttttgaaaaagtgtctactttgccaataaacccctaattatctaaaacaaaaaaaaagttttgggattagtttaagacgaagaaaacgatatttctttagttatagttttttttttcttagatggatttcatcatatgtttgggacaagaaattacgttgcaatttttcataacagatttatttgaatgaatgtgtagcaaatttgagatatttgggcttgcgatggattttgtttcaaaataatagatttttggtagtagccatacttcggaaatgtaacaagtttttctcttaattaaaattcgattattacaagggggtttattccccctttgggacggaaatgcattttttagataacaatggactaaaggctggctctagaggcaatcagttgctccatttccacaaatttttgcaaaattcttctgcttcatctacgtctttagcttctcaaagtgaataaattagctctgagctccaagtccaatcgatttccttcttgttatgcctggaaaagacagtttaaacttgataagataggttgcattgctaacttgataagcctggccttctgcagcaagtcccaaactcgctgaaccgcggtagcatcagatagttcagcatatgagctattgagaaaaccatagcaatcagatttggaaaacaacggcgtgtactttttaatgtagtaaaccgtatgttattattgggccgacttcatgtgttaaccttattcgggccttggaaaccttgggccaacgtcatgtgttaacctagttcgggccttgagaatcttgatttcaactctattaattgttaaagatagatgttcttgattccaacattatcatggagtttatattgccgaattcatgatgagccttcttttgatttgagtccccccaaactcagataaacgtcagtaacatttgagattccagcatatgagcgagcaattatgtttgcaaaagttcattgttctcgtatatttcttattcatttccattaaaacagctttagttagaatgattttagcgaccatcacatagattctccttcatgtacgtttaagttctttttcgttttatgtatctctatgtacacacgttttatgcatatagatctaaggcaaactataacgagaacatgagtccgaacaaaatgcttcaaatgcttagttttacagaacattcacttatcattactaagctttaggatgaatcaagggcaaatcttgctaagcaaacattcttgctcttcgtctaccaggatcccttgttcttccaatctctttttcatatccggacaagctttccctgcagcgaggtaagtcttcataagaagagtgtaagtttcagaactgaggggactccatttcgtcaaggttttgcagaattcttctgctccatcaacgtctttggcttcctcaaagtgaagaaagaacgaactgatcagctctgagctccaagtccagttcttgtcttgatccaaaaccgccgcttcaaaatgcttcagagccaaatctgcctgatcgttcttcaacaggtgcatcatcaaaagctgccttgcctttgagaattgacctttacactttttcatggcgccgttgaaaacagcctcagcttcttcgtacatgttctgctttaagtagctgctaatcgctacattcgccatccgcatatcgtaagtccagcatgtcgattcccattctgcaaagactttcttgactccatcaatgtcatcgagtttactcagtgctcgaagcattgtaagatagcttgaattgttgacattagggtatcttttcttaagcaaatcccaaactcgataaacctcagaagcatttgcaattccagtatacaagttaatgagaaaatgataacaatcacgtacgtcaggattcatattgttctccagagatttcaacgcctcttctgctttaccgtagagaccgactttaatataaattgctgcaagattagcaaatgtattccaagagaaaataccttcaccttctgctttcatttcatcaagaaccttctctactccatctaaatcctttaaacttccacagctttgtatccacatggagtaagtaatatcacaaggagtaatactcttctctttcatcgcaacaaccaatgcaggcaccttctctggttgacctagccccatatacatagccatcaggttattaaacggcaaagaattactcacatgattgagatcaaccatattttcaaaatgagcctttgctttaacttcctccttttccacacagtaacagttcaataaggaaccataagtggactgattcttaatagaatcgtctaaactgttgaagtaggtctcagccgcctctaagcctttactctttgcaattagattcaaacgaatcgcgtgatcgctgccagtaaacgctatttcctttctttccatccactcaaagatctacacataattcagaaaaactcaaacactatacacatttaagcttcctatacaataagcctctaacaatggtggctaaaatcaattccaaaggaaagaggagacaaacctcgagagcgcgttgaggttgacgaaacttgcgaagatcctttgcgtagcgaatgaggtcgtgttttttgacaggtacgccttccatgacgaactgatttagcgtttcctccattttccctcctcccctcgtgccaaggcttgagagtttcttgtatattgaccgatgctttttcgccttcgtcggaacagaagcagcagcctcgccgctaatctccgccgtagcagtagcgagcgttgcacagaacctcctcgcgagccgtgaaacggaatgcatcatcagatttacggattttgaatttttttctgagtctcactcgaatctatgattttgctagggtttaaaaggcttttagaaaataagaagtcgaacttcatgtcgtttttatataactaaaaacgacatatagtttatttttgtaatcgtctctcttttgttattggagcagaaaaacttgtaaggccagaaatggctgttcttatccaggttcttcttcctcctccgacgactatcgtcttctccaactcattttctacaaagttaatactcacgcgtcgtcttcgttgccgtatctctaattcgtcagaggtggttccaatttgattttttttttttaaatctcaattcgagcaattttgtacatatatgaaatgtgtgattttgaatttgattctcaggttaaatcagatgaaggagctccgaagttggagtataagccaggacctctcgacgatttcttcatgcaatcgttccggaacaaattggtcgaggtgagttgtgaaatcgattttttttttctggtttcttcatgaattttagtgttttgatttggagtggtaattaggttttaacattagtctaatgatcttctttatgttcaagtatgtgtaacaggaagtcgggtcggattcagagaaacccgggtacgttggacttattgagttggttaagcttctcttgttgaaaggtcgtactaggtcggagacaagtgatgctgcggtacatttctcattgagaagttatatttatagacactttaggttaaagttctgagtttttggttcttttttggttgatacaggttcgaatactgaaatcgttgtttcctccgctaattttagagctttacaagcttctcattgctcctatagcacaaggaaaattagctgctttgatggttggtgagttcttttgattcttcaatcttccatgtcaatgaaaagttgtcaaaatattggtaacaattagtgttttttgtttcccattgaagcaagagttactgtacttacatgtcaatggctcatgggaccgagcaaagtaaacatcatcgatcttcctaatggagaatcttgggatagcggggtaatgatgatactggaactatgcatctgtttcgatatgatttgttttgtcagttatttttctatcctttgataacgaagaggagtttgatgaatccaagtaggttttcgtggagaaatgtcagtatctagaagaaagcaagtgtgtaggagtatgcattaatacatgtaaactaccaactcaggtattcttctgcaatttaacaagccaatcaaccgattattactgtaacaagacatgaatttgattaatccctgaaaatgtggatttcgtttttttttccagacattctttaaagactacatgggagttcctttggtgatggaaccaaacttcaaagattatagttgccaggtacatcttgcttgccccttctctaaacaatagacatatcaactctaagttcatggatttacttatcgtcattcatcaactggtattaatcaaaattaacatgttgatgtttttgaatgttcccatttctattagcatcttctttggccagttattaacttcatgtttgaatcataacagttcaaattcggagtagctccaccggaggatgatggcaatgttaatgaaccatgttttgagacatgctcaatcgctggccgccggaaattaaaatccggggagtgtcctttagcgtaaatatatcgtttttatgtccatacactgacattttacgttgtgtaataacttgtgtatatcaacattctagctttgattacgaaagaaaacacaaaatttctttaactaagatctaatccaatttttatgaatatcaaagggtattataagaaatgttgtacatgtgaggttttacattacggtgtgaaaaagaataaaacggttgacatctataacgttcaaaggggtaaaaattaatcgaatttgtggaaaatcaaaaaatattagaaggtcatacaagaaaggtcggacatgtgaaagagaaatagaaatctagttattttttttgtaaacctgaatatgacatctctaacgattgatctcctgtcagtactacgaagggaaccttggttgtataacaactggtttgtgacaactcatagatgggaggtaaatcttacgtttcacctgttaacatctattgaattatgggttcagatgcgtggaattcctcttttgtatgtgtgtgaggaaactgctttagagatagcacatgagttaggaaagattctcactctggattttcatgactccaccacgactcaaatagcttatatccgtgtgagaatccggtttggaattacagatcgcctgaggtttttccaaagaatcatttttgattttggtgaggctgctctgataagctttcagtatgaaagacttaggagaatctgtagtagctgcttcagaatgactcatcacaggaactcatgtccttaccgtcagattgagcctctccatagggtgactaactccactgctcaaaggaatgttagagaagaggtgttcatgagagatgaaaatctgagatcttcaatgaattcacaatctcagatgtctgagagttcgtttcctactcctatcgatccacctccaaggattcctcatcctcctttaaatcctgatgaattggtggctgcatattaccctcatacaagagctacttctttaccaaactttgcaggtcctttgcctcaggtacctcttagaaaaaatgtggatgaaagggattctaacatccagcctttctccggacctgcatttgcagcacactctccacgcctagtggaagtaggtgaatcatcaaggcaaggtgagaatactcagaatgttcacacggtggaaaagggggattcatcaaaaagaaagaacatgggtggtcccaggtttaaagatgatgcaagaaagtccaatgaagatgagcatatgaatggagggattctgaaacctccaaaaaagcgttgatcactctgctataattctgtcatgttttttaatttagttgctttcagttcaatcaagcagccacaagatatgaagaagatggtatggcctagtatccctttttggttttggcatacccgaagtgtaatgttatgtggtgtaatgctctactctaattacccttactctactcttttgttttacaacttagatgactctctagttagataatctaatgttgtaagtggtaaaagtgtgtgtcaaactctgaaagtggatgttcttccactgttggatcgtttacaactgctgtttttaataaaaagggtaatacttatgagaaaaaaaaaagacatctctaacgatcaaaagactggacaccaggttcagtttgttttcacagtaaatgcaatttaaccatcaatttttttcactaatttttgactcttcctcagaaaaggtaggatgataggatgataagtaaacaaatttaggaatatctgttttcaaacttgtatatatattattttttctgtcatctgtttttaattagagctcttttgaaccatttttgtggaatattgtttacataagtgatgtgatgcggttcggaacggacttttcgtgctaaattatatgcttttacatttgcgcttcgagagattaaagataaagagaagtttgaaaactcatccttgtcgctctgaaattcctccaaatatcatgttggccattcggttgggaaagacactatcttcaagcttgtatatattttatcttcaagctt

SEQ ID NO: 512 - DNA, 105654 bp, Arabidopsis thaliana
aagcttctcattgctcctatagcacaaggaaaattagctgctttgatggttggtgagttcttttgattcttcaatcttccatgtcaatgaaaagttgtcaaaatattggtaacaattagtgttttttgtttcccattgaagcaagagttactgtacttacatgtcaatggctcatgggaccgagcaaagtaaacatcatcgatcttcctaatggagaatcttgggatagcggggtaatgatgatactggaactatgcatctgtttcgatatgatttgttttgtcagttatttttctatcctttgataacgaagaggagtttgatgaatccaagtaggttttcgtggagaaatgtcagtatctagaagaaagcaagtgtgtaggagtatgcattaatacatgtaaactaccaactcaggtattcttctgcaatttaacaagccaatcaaccgattattactgtaacaagacatgaatttgattaatccctgaaaatgtggatttcgtttttttttccagacattctttaaagactacatgggagttcctttggtgatggaaccaaacttcaaagattatagttgccaggtacatcttgcttgccccttctctaaacaatagacatatcaactctaagttcatggatttacttatcgtcattcatcaactggtattaatcaaaattaacatgttgatgtttttgaatgttcccatttctattagcatcttctttggccagttattaacttcatgtttgaatcataacagttcaaattcggagtagctccaccggaggatgatggcaatgttaatgaaccatgttttgagacatgctcaatcgctggccgccggaaattaaaatccggggagtgtcctttagcgtaaatatatcgtttttatgtccatacactgacattttacgttgtgtaataacttgtgtatatcaacattctagctttgattacgaaagaaaacacaaaatttctttaactaagatctaatccaatttttatgaatatcaaagggtattataagaaatgttgtacatgtgaggttttacattacggtgtgaaaaagaataaaacggttgacatctataacgttcaaaggggtaaaaattaatcgaatttgtggaaaatcaaaaaatattagaaggtcatacaagaaaggtcggacatgtgaaagagaaatagaaatctagttattttttttgtaaacctgaatatgacatctctaacgattgatctcctgtcagtactacgaagggaaccttggttgtataacaactggtttgtgacaactcatagatgggaggtaaatcttacgtttcacctgttaacatctattgaattatgggttcagatgcgtggaattcctcttttgtatgtgtgtgaggaaactgctttagagatagcacatgagttaggaaagattctcactctggattttcatgactccaccacgactcaaatagcttatatccgtgtgagaatccggtttggaattacagatcgcctgaggtttttccaaagaatcatttttgattttggtgaggctgctctgataagctttcagtatgaaagacttaggagaatctgtagtagctgcttcagaatgactcatcacaggaactcatgtccttaccgtcagattgagcctctccatagggtgactaactccactgctcaaaggaatgttagagaagaggtgttcatgagagatgaaaatctgagatcttcaatgaattcacaatctcagatgtctgagagttcgtttcctactcctatcgatccacctccaaggattcctcatcctcctttaaatcctgatgaattggtggctgcatattaccctcatacaagagctacttctttaccaaactttgcaggtcctttgcctcaggtacctcttagaaaaaatgtggatgaaagggattctaacatccagcctttctccggacctgcatttgcagcacactctccacgcctagtggaagtaggtgaatcatcaaggcaaggtgagaatactcagaatgttcacacggtggaaaagggggattcatcaaaaagaaagaacatgggtggtcccaggtttaaagatgatgcaagaaagtccaatgaagatgagcatatgaatggagggattctgaaacctccaaaaaagcgttgatcactctgctataattctgtcatgttttttaatttagttgctttcagttcaatcaagcagccacaagatatgaagaagatggtatggcctagtatccctttttggttttggcatacccgaagtgtaatgttatgtggtgtaatgctctactctaattacccttactctactcttttgttttacaacttagatgactctctagttagataatctaatgttgtaagtggtaaaagtgtgtgtcaaactctgaaagtggatgttcttccactgttggatcgtttacaactgctgtttttaataaaaagggtaatacttatgagaaaaaaaaaagacatctctaacgatcaaaagactggacaccaggttcagtttgttttcacagtaaatgcaatttaaccatcaatttttttcactaatttttgactcttcctcagaaaaggtaggatgataggatgataagtaaacaaatttaggaatatctgttttcaaacttgtatatatattattttttctgtcatctgtttttaattagagctcttttgaaccatttttgtggaatattgtttacataagtgatgtgatgcggttcggaacggacttttcgtgctaaattatatgcttttacatttgcgcttcgagagattaaagataaagagaagtttgaaaactcatccttgtcgctctgaaattcctccaaatatcatgttggccattcggttgggaaagacactatcttcaagcttgtatatattttatcttcaagcttgtatatattttggttacttttcacaattacgcaattttctacttaagcactttgagtcttaggtgacaagtgtataccaaatcttgtttctgtaaagaacaaatggaaacattcattctacaattgcgcaacatatataggaaaactgaaaccacatttaaaaccaaattctacaatttgatcatcaccagaaaacggaactgatgacatcatcatatgtgtaacatctatcttttaagcacttcaaaaatttctgtggttctgttttggtttctataaaccatattctaacgtctattaaaaggaagaagataacttcaagccaaacaagctacataaaaactagaactagaagagaacattcaagaaatagactaagaacaaaacgcttgtggtctctcttagagattctgaagaatgttcctaaagaaagcaagactgtggaagattgaaggaaagctaaagatgttgaagaaccctgaaacaatcattaccatttggtatcaaaggctcatgttttggaggaaacattgatgagtctttcaccagtttttttaaccccaaaggttaaaaacctgctaacaagtatttcatacttaaacaatttctctggaaacagttactttacataacaaagaaattgaaatctttcaagaaacaagagaactagtatcattcacggttacaaaattagcttcagacacgaagaaacacaacacaaaactagaaactaatgatttctattagtaaattaacggagcaatcaaacttgaaagacagatgatgaaatataacttgttaaaatgtatatccatgaataatcgtaatttatagtaatctggagagatattgttgatcaacgaaaattgtaattgagcactaaatattttttctcccttctcagacactcataacaaaagaaaggtctcatatcgaaccactactaagcaatcattacaaatcaagtaagataatcttccaaggacaatcaataaccatctcttttcgagttcatcataaatttcaatgttagtaatagctattttttgaattaatacatagaccactcaaacaaacaaggtattcaagttagcactaaaccaatcaacacaaagattaaggtaagaaaacaccgtgtaacaaccaacatattcaagcaaacaaatactacacaacaaacaaccgaaaaagtcacaacttcaaagcataaaccacacaagcacatattcaagttagcatattagaccacacaatacacatatttaagtaagtacagatcatgcaaccactaacaaaattcaagccatcgctccaaagaataatccatagaatgaccaacggatttaagccatagcttcaaattataaaccatagtccacataatagtccataaaacaaccaataaaatcatattctcacgtctaaatgttcataacaatactaaacaagtaaaaggtatctttttctaacgattatctaaattgtttacttacctaagaccgagttgcaattaatgtaacaaattcttcatttttatcagaagtaggttttgattatgatagtgtttctatctttgttgacatttttataccctgcactaagaagagtgattgtcaaataaattccattgaatcagttgctcaggtatttaaagcaggatcttgttaacttaagatttctaacattaatacttatatcaaccaatcgtatacaaacataggagaagcacatgccttatcctaaagtaatttcatattcttgcatcaaacaatttctaaaaatcaccaagaaagtacctgagggatgttatgcagagtctatttttcaattatcgctgtgatctgcgccataatctaagtatgtaacaatataaaactaattaaatacaagtttaaggagaaacacataccaatcttgaagtccatagacactttgaaatctctgagtcttcaaaaatatctggaaaaataaaaaagttgcgtcagttatcatttggtgcacatatcctctttaaatttgcgatctcactgtgtatggcttattttataccacacacatttagaccaagtagtcactggtttgtgttaaccttaaggggctttttctgttcccttttcccatctgaaacttgaaccttaaggaactctcatctgaaccaagggctctgtcaaagccatgggtttgagattgtcaattgtatttaagccgttggtttttataccgtaaaaacggtttaagccgtaggtatctttcgagattcaggacaaattgtctccgatcttttagatcatcacagagggacaaattatcccaatttagattcagacacaagggcaaccagtaataataccgtatgtctaatctcttgggattgaactatatagcaaattggaaaccacagttcagagaattacctgaagagtatgtagactgttgcgaaagcattctcgagaaaactctctgtgatcaatgagagaagaatccagtctctgtcttcttatacgaacatgatctgcaacaataagaagaaaaaaacaatgttaggtaaatatacaagtctttgatcgcttaactgtactcaaaattaaattcacgattacagatattgaaaccctaattcaaagaatcaaacacaaatattcgattaattggaagtaaaatcgagtaaatcaaaacaaaaaagatcgcaagatcttaaaagaaaagcgatttttgagaatttgaaaccctaaagagttaattcgatgaagaggattatataaatctttgtttaattttacccaaattgaagagagaaacgagagaaagaacttaaaggcgaatactaaccgaagagaaaaccatcaatctccgattagttatactcaaatcgagtacaacaagggaaagaacttgaaaatttgaaaccctaaacatcgattacagaaattactgactgaagagaacgataagtcatgataaatccagatgaaaccgaagatttgaacgaaaacttacagagcaaaattcaaaatcgccgatcaaagagtcgcagagaaagagaataatgaaaacctttttttttggcattataatagaaatctcagggaatttgatacgcttatatacgccacgtggcacattcctaacgttgtcgccaacgctaataacggctacattacgttttagaaacaaatgttttgatttttgcgtgttgtgattagtgaatgtggccacgtcataagcgttacatgtaaaatttgttaaatattaaattatagcatgccaaaaaagaacaacaaaaaaaatattaaggaaaaagcaaattacaaatacatcttttatgtaacacgatcacattatcattaaataaattaaaatattattattcaaaagtgaaacatgtggacacaaaattatttaccgaaattatttattcttcaaatcctaatcatcaaatagtatattttaatgtttgatgattctgattactaaccatctagaatatttgctaaagtttgtattccctctatttcataaaatttgatgttttacgttttgcacgaaaaagtaaattttttattttttaagtattattttgttagtttaataatattattgttatctcttccttttaatattggccacaaacaaaattaataattatacttttacaaaacattaatcttttgtggaacaagtaaaagaacccaaagcatcaaataatttggaagagagggaaaaattaacaacgtaacaaggtttttataagtcgtccattgttaagaaattgggctatagtctaaatatttttttaacaatgggtcttaaaagttaaaacataaaaaaaaatccaaaaattgtgatgagcttctgcaccgatgcccctttattctacccatttttggtctgggtctggtcttcacgtcggctcttggtacactgccactataaattccgaaagctgctcgtcgaatctctacattactgacatgtttggttagctatctgttcatcgtcttattcaccgggcagaatcattcaagctagctatctattcttgagaaaagctttcgaaaatattgtactgccacttcacctttagaaccttaagtaaattgttcgataccattgccattgtaagaaaggattttttattttttccggtttaacattggttttcattttaacttttaacggatcaaaatattaacagagaagtccgatagtgactgactgactgactgtgacgctttttgtttttagctaccgttaatgtttgttttccgttaacggcgtattttagtgtgcgtggacatatacgctcaagtacgccgcacgcttctcttctttttgtcgcgcattcaaaaaccgaaacgatcagaaaaaaaaaaaaagaatattaaataaacattttggactaaacaattaatttttttttaaaataatttctcgaaagagaaaaaaagagagagagagagagagatggagcttctacagtactaaaagctgagtgaatccgaagaaatctccgccaacggaatattttttttctgggagctgaaaatcgttggtgacgatggcggattctctttctagggtttacggaactctgtttagtggtgttaatatatctctcttctcggatccaccgttgaaaaccccctgaagagtgtttttttttccgggtttaaggtcttttacgtttcgttttttcttgagatttcgtcttccgctgtgagtttctgttctcgcggcgagtttttgtgtagatctgagggttttcaaggcaagagaaagtgtcggtgatgtcgattttctcactcgcgagctcttctggtaaattctcgtttatctattagcttcttatactgtctcttccaagtgtagtgatctcgatttttaaggaattttgaaattggaggaaaaaaagttgtgatgtttcggatttctaattttgtctatgggacctatgtgatatctagttactttgtttctttatctgttaggtcactctgattttggttagtgaatatcaagtcacaatatagatttggaatgtagtttggatttgaacttatcgtgctcaagatttttaggtttatagtttctaaatatatggtacatgatctttagctctggacctatatgttagattatccaggctcaaaaaggcaaagtatgttggaagtgatttgggttttggaccatgtctttgtatattttcatgaatatagaatagtaggttgaattcattaggttgcttaaagacattctttcaaaattactcccgaatggttgcaatacctaatcacatggctagctttagttctgttcttgtcttagctctatctcactgtttttaacgatataacaatcccagattcacaaagagatgacctaataatggcgttgaaggcggtggttattgtatattgtgtggtttctctcgtcagtgttcaattagctgatgctcaacatgaaggactgccagtttcaccaacgttatcaccttcaacttcaccagttatcactgatctgcccctaccagctgaatttccgcggtttcacagaaagtatttcgcaccacaacaagcagaagcacctcagcattctcccccttatagtcgtttggtcgcttctgatcatccccctaccagctcacatttctccaaaccttccatgaaaaggaatgctcagtctcctggagccggcttggctgatattgctccagcacaatctagcaatggtgttcttcctgatgccttaactcagccacctttgtcgccctccatttcaagtaagaaattatccattctcataactaaatcaatgttagcctttacaaggataatttaagttcaactttctctcttttccattttgaatttgaataactttttgattcaagattcattgtgtttatttgttgttcttccagattgttgcaaatcagatatggtgcttaaacgaagaagtattggttgccactgcgtgtatcctataaaactggacatccttctcttgaatgtttcagaaactcctagttggaacatgttcttgaacgaatttgctacccagcttggtctcctacctcaccaaatcgagctgattaacttctatgtgctaagcttatcaaggatgaacatatcgatggatatcacccctcattctggaattagtttctcagctagtcaggcatccgcaataaactcttcccttatcagccacaagattcaatttagccctactttggtgggagattacaaacttctaaaccttacttggtttgaggcccctgcaccttcgcaaggtaaagtacttttctacaattgtatctgggaaagaattcaatcgccccatcaattctgcacatttgatttcacatctgcggtcaaagtttcatcacattcaagatagcatagccgaaagaaagtagactgatatagttttttatgttaaaaaagcatctcccagtttgatgctttttggagtatatcaccatgattccttgcatttgcactaagataggtcttaatatgtttgcagcacctctagtggcttcttcacctcataaagcaccatcacaaggatcctcagcaactacgtcagtaagatctccagggaaaaagaggcatcccaatcttattcttatcttttctatagccgctggtgtgcttatacttgccataatcactgtacttgttatttgttcccgcgcactccgagaagagaaagctccagatcctcacaaagaagctggtatgtacctcttctgattacaaggtttaaattataggccgatctcagttaggaatacgtgaatcatgtcaaaaggtacacatcatgtgagcagcacattgggaagttagcatagatgttgggataatgtcaacttttatattgggtttaaagttgtgttgttagttgtcaacagaccttatgtaaaaagccaacagaccttaggaatcaaacaaaaggattgagaaaaatggggatacatagatgatgaatgattgctgtccacttaccagtgtgatttatgttactttcctaaatcctggcaattaacttttagttcttgttcttagtaaaaacttgatcgcatattcctttctttcagtaaaaccaaggaacctggacgctggttcatttgggggatctcttcctcacccagcaagtacacggtttctgtcatatgaagaactcaaagaggcaactagcaattttgaatctgctagcattctaggagaaggtgggtttggcaaggtttacagaggcatcttagccgatggtactgctgtagcgattaagaagctcacaagtggtgggccacaaggtgataaagaattccaggtggagattgatatgcttagccgtcttcatcatcgtaatcttgtgaaacttgtgggttactatagtagtcgagattcttctcagcacctactttgttatgagcttgttccaaatggcagcctcgaggcttggctccatggtaatatctcctctttgcttcccttgctgcctatttttagatctgacattgtcaaaagtagttattgtacactgagttcatctacaagagtggtttatttaagtcattgtttatgcttcagggcctctcgggttgaactgtcctcttgattgggacaccagaatgaagattgcacttgatgctgcaagaggacttgcataccttcatgaagactcgcaaccctccgttatacacagagattttaaagcctctaatatactccttgaaaacaacttcaacgccaaagttgcagattttggcctagccaaacaagctcctgaaggcaggggtaatcacttatctactcgtgttatgggcacatttgggtgagttgctcatatctctcgacagttttcatatacaaccttaaattctgagttgcctattgaatccgcgatctgttttcagatatgttgcgcctgaatatgcaatgacgggacacctactcgtcaagagtgatgtttatagttacggtgtggtccttctcgaattgttaactggtagaaaacctgtggatatgtcacaaccttcaggccaagaaaatctcgtcacttgggtaagtagaaagttcttgtcatctcctagatcttcctgcactttcattgtcgaaaacttaagcttttgaagtctcgaatgtaaaaatttgattctggatgcagacaaggccagttttaagagacaaagaccggttagaagaactagtcgattcaagacttgaaggaaaatacccgaaagaagatttcataagagtatgcacaatcgctgcagcttgtgttgcacctgaagctagccagagaccaacgatgggcgaagtggttcagtcacttaaaatggttcaacgggtggttgagtatcaagacccggttttaaacacttcaaataaagctcgtcctaaccggagacaatcatcagctacgttcgagtcagaagtaacctcttctatgttctcttctggtccttattctggtctaagcgcttttgatcatgaaaatattacacgaacaactgttttctcagaagatcttcacgaaggccgatgatagaagccagggttttcttctttttatttgtttttctcccacttacggtgagaaaatttccaccagagaagcttttgagtttgggacattattacagctctttggattttggattctcctttattggaggatagaattttgtatatatttttgcgttaattaattaatatttgccacaaccatcagatatacaaatagaatttgaatatactttttccaatataaaaaaactatgtacaggtgattagtttgtactgttaatttttaaaggctttttacagtaaaagtttttacagctaaaagtaacagtataatactttttttttatggaataatctaaataaaatataatctgttgaaaaactaatattttaaatataatttttatggtatcaaaccaatatttaaagtaattcctttcttattagttaaaatcacagtttttattattattatttttgatagtggttatgttcaggaaaggactgtcatacattcaggatggatttacagagattgcaatggatgtttccttagttcagggcgtgctcaacttcaatcgtcacaattatctcttcaagcagaggctctcggatttcttcatgcccttcaagtgacttggtcccgaggactacattatgtacttatgtgtggtttgagagcgataatgcagagctagtaaatctgatcaatacgcagagtgatcataataagatcatcactcttctttatgatattcgttattggatggtgaagcttccgttctcttccttagcacatgttaattgggaaagaaatgcagctgcggacatcttatctaaaaaggctcagttaattaattctctgtaccaccattatggttagaaagatatttgtatctccctttacaagtttataagaagcatacatatgttaaaaaaaaaaaatctttacagtttaaatctttacgctcagagatttttactttacagctaatattcttagcctcaatggctagtattgttaacgtcaaagtttctaaagccacacaaatcatagtagttacctttaagataaaatacaattataatcacaaatatcttaatatttttacgttcagagtttattactttacaactaatacttatctcaaacgtaactgctataacctgtgtggctctagagactttgacgttaataatattagccattattagcctcaacggctccagagccaggcatgtcgtaatagttatctttaagataacatacaattataatcacaaatagaaaataattgtcgcaaaaccactaattaaattacacacgtataagcactattcattcacacgtgtggcgttctttgtatgtaatgtaaccccccttccagtccacactccgttcgtccttctcacaagtctgattgcggaaaaagcagagagagagagaaagttcgagcggaagagaagcggaaagctcgaggagtcatcaatggtgacggacgatagcaactcctctggacgaatcgtactcagatttacctttcaatctcctcttttttttttttttttgatttattatctgattttgctcgtatgcgcatgatcattcgcgttttttcagctgattgttcgtgaaatccgtttgagttcatcaaattataatcgctctcttacttttgttcactgttggagttgatggaccttatagaattagtgtttttcctcgttgcttttgttttttacacgatttttgttttgatttgggcttctgaatagaagtctcatgtagatgatgatgatgatggtgaagaagaagaagatagactcgagggtttggaaaacagattaagtgagcttaaaaggaaaattcaaggagaaagagttaggtctattaaagtaagagagtttctatacttgatgttctttactaattatactaatgtctaaaaaatttgaaatcatttatccgtttttgattgttttcctgggaatgtaggagaaatttgaggctaatagaaagaaagtggatgctcatgtttctcccttttcatctgctgcatcgagccgagctaccgcagaggataatggaaatagcaatatgctttcttcgagaatgagaatgccactctgcaagttaaatggtttttctcatggtgtgggagatagagactatgttcctactaaggatgttatatcagcaagtgtcaagcttcctattgctgagagaataccgccatacactacctggatatttttggacaggcatgcaccttttctagttctcatttttgcgttggtagcatgctattctaaattcagttgaacaatagactagaacatcaaattcagttttcatattatgtgttgtttttcttttctgaaaaaatatcttaaccatgcagaaatcaaagaatggctgaagatcagtctgtggttggtcgaagacaaatctactatgaacaacatggtggtgagacgctaatatgcagcgatagtgaggaagaaccagaacctgaggaggaaaaacgtgaattttccgagggtgaagattccattatatggttagttttgcagagagtgtaaattatggactctcatgtactctgatggggaaaaattgtgatactggtatttgaagaagtacctgggtggaatttattaaccaatgaatcacatttgttgatgctaaaaaaagatgtcatatttcgtattcatatcaaatttcattctgtaagactcttcattagcattaggtttgaaatatatctcactatatatgaatttcttcatacctcgtttgacttgaattggcaggttaattgggcaggagtatggcatgggtgaggaagtgcaggatgccctttgccagttgctaagcgtagatgcttctgatatcctggtgcagtttttagtcatcttgttcttgtggtttatctaatgatgtttttctggtcttcctattcttcttcactaatgatgtttggctttcctgtctgctgcaggaaagatacaatgagctcaagttgaaggataagcagaataccgaggaattttctaattccggattcaagctgggaatatctctggaaaagggccttggtgcagctctagattcttttgataatcttttctgccgccgttgcttggtacttggattgttctttgtgacagagagagcatgtattattaagtgtttgttaatcatgttaatccttctttggttatttctaacaggtatttgactgtcgtctgcatggatgttctcagcctttgattagtgctgtaagcttgaatttgtctttactttctttagttgtattgctaaagtttcagtggacaacataacaagagaactttggttgacagagtgaaaaacagccttattggtctgattatgaaggtgataggaaaccctgcagcaaacattgttacctccaggtctatctctctctctgtctctttacattctcagagtgatttgtatattcgtagttaataaactatattcattagtgagatcatggaatatatgctctgacctagattgaggtttagcatgtatgcgtttgctagaggagtgatctttcattgtagttgtactagtgcatagtcttgtttatgcagtaatttttcttggttccagagtttgaatcaccattattcttatgttaatgattttagctcaaggcggtcagagaagtaccagaaacatgcagtaattttgcatctaaagcagaagagaaagcttcagaagaggaatgcagcaaggctgtctcctctgatgttccccatgctgctgctagtggtgtcagtctgcaagttgagaagactgatattggtatcaagaatgtagattcatcctctggtgtagaacaagagcatggaattagaggaaagcgtgaggtcccaattctaaaagactccaatgatctgcctaatttatcgaacaagaaacagaagaccgcagcctcagatacaaaaatgtcatttgttaattctgtccctagcttagatcaggcattggatagcacaaagggtgatcaaggtggaacaactgacaataaagtaaacagagactcagaagctgatgcaaaagaagtaggtgagcctattccagacaattcggtccatgatggtggttcctcaatttgtcagccacaccatggtagtggaaacggagcaataatcattgcagaaatgtctgagacaagtcgaccatctacagagtggaatcctatcgagaaggatctttacttgaagggagtcgaaatctttggaagaaacaggtaaactggatcttggtaaattattatctttaaacacagaacacctataacgtatttacatctagtatgttttgtccgtgctatctcagctgtcttattgcaagaaacctgctttctggcttgaagacatgcctagatgtgtccaattacatgcgtgaaaacgaagtttcagtttttcgaagatctagtaccccaaatttgctgttggatgatggcaggactgacccagggaatgatgtaagctcttgatcttcctagggtcttttgtcttttcaaattttctgcagtatctgcgactttgggcattgttgtattgaaagttagcttgtcagactgatagggttagagatctattccagaagaaaaaagttctgatccggaaaagccaatttccttgcttaatttttccctgatacctgcattggacaagagaaaacgatagttgaccataagttggcttagacaagtgattattttatttgagattttattgatattagcatgccatgtctgtcagaatcatattttggtttaccgctctcttactttacttgacagaatgatgaggtgcctccaaggacaagattgttccgtagaaaaggcaaaacccggaagctaaaatactctacaaagtctgctggtcatccgtctgtctggaaaagaatagctggtggcaaaaaccagtcctgtaaacaatacacgccgtgtggatgcctgtcaatgtgcggaaaggattgcccttgtctaactaatgaaacttgctgcgagaaatattgcgggtatgcaaacaaattaacgtcaattgaagtaacagaggatcttcttataaccatccattgatttaattcaggtgctcaaaaagctgtaaaaatcgtttccgaggatgtcattgtgcaaagagtcaatgcagaagtaggcagtgtccctgctttgctgctggcagagaatgtgatccagatgtttgcagaaattgctgggttaggtagtcattttaaatctagatctcttgatgtgccatatacaatcaaatctactatttgatgagtaacttaagatgccttgcttattcactcagttgtggagatggttctctcggtgaagcaccaagacgcggagaagggcaatgcggaaacatgagacttctcctgaggcaacaacagagggtataatactgtcatcaaatcatgtatttactaaaaataaaatgcattcattgttgataaatctagtttctcatgtgctatatttaccagatcctattgggaaagtctgatgttgctggatggggtgcttttctaaaggtaaagcatgtgaatatcttcctcattaacttctgtttcatacctcttgtatgtaatctgaacctcatctgatcatcagaactcggtcagcaaaaatgaataccttggagaatacaccggtgaattgatctcacaccatgaggcggataagcgtgggaaaatatatgaccgggcaaattcgtccttcctctttgacttgaatgatcaggtgaccaaatctctcacccttctttctgatagtttcctcttgaatttcgcatatgtcagtaagcttttgatatttgcagtacgtcctcgatgctcaacgcaaaggtgacaagctgaaatttgccaatcactcagctaaacccaattgctacgctaaggtactaaatgcttctctctcatatccattttggtatgaaaaaaccacatgatcggttagtaattataccttctttctcacctctagccactcaaaagttccatttagaaggaggactaggattataacattttgtagaaactaatcgcaattagcactatagaaaacagatgatcaaatctagctttgtaggttatgatcaaaacacacttgtttctacaatctttatgattgtaatgtgtaaagtaacatgtgtatatcatctgctagatttattcaacccttttcgaaaggtgttaattatttacaaaaaagagcgattttcagtctattgtcgtagtaaccatggtctcatcgcttcccgcataagtacggtgtctttttctgtgtggtgtaggtgatgtttgtagcaggagatcacagggtcgggatttttgcaaacgaacgaatagaagctagcgaagagcttttctatgactatagatatggaccagaccaagcaccagtgtgggctcgcaaacctgaaggctccaagaaagatgattcagccattactcatcgtagagccagaaagcaccaatctcattgatgattactggctaagagaagtaacttttataaaaataacttatagagttgtgagagatgatatttgaagtttgataacttaagcttgtctttattaattaattattatagagttgagattttattttattttgacatcgagtttggactttgtataggtgataaaacaatttatgaattattggggtcaataagtaaaaatgtatcatttcgaaaaatagtttcaaatttatggatttttgaacagctaaagccaatctatgtacttttcaacgaataaaactgatttaaaataagtgaacgaaccaatcacactaaaccagtgcctaatctcataaaaagtaatccgactgctaaaccgtattccggttcgaatcggatacggatccgtttcccagttgattagtcggatccagtttcttcttgctttttcaattcacattacgaatctccgacgccaaaattctgcttccggtaacagatattttcgtcgtcgagaagaagcaggagtttagaaaaatggcgacggaggcagctccgatggacgaaaaggcgaagagaatgagagatctattgtcgagcttctacgcaccggatccttcaatctcgacgagtggttcctccatcaacgcctctttcgataacatcaacagcacttcctttgatgctgatcagtacatggatctcatggttagtcttcgtttcttgtcagaatattcgtgaatcgtcaacacaagcgtcaatagcttgtatattgtatcaaattattgagtatttcgattcactgaagttagattcggctctttgatcttggtctaagtggttagttcgaaatttagaatatgtttagatccgactgttatcttttggagcaggaatatagttgctagttttgaattctacccttcggatgaagtttacagtgcaaggttcttgtagaggtctcttgatcaatgtggtctggtttggttattttctatgcaaacttatgagaattctgcaaatttagttgttcttatcaaagatcttcctgcaatggttgatagttcggaactaaattgggtttatgaggtttgtgttaagtgtggtgacagtagtgctagcgatctgattgagatatatgccacagtctggtgattttattggcttgtgcagatcaaaaagtcgaatttggaggtgcttctgcaaagacatgttcaaatggctgctgagattaaaaatctcgacacagacttgcaaatgctagtctatgaaaattacaacaagtttatcagtgcaacagatacaatcaaaaggtacttgtaatggttcatggatcgtttcaggtgttaagtgtgtcatttaacacttttctctatatgatttgatttcaccactcggtagtatattaaattcaaaatgttgcttctttacctggtaggatgaagagtaatattttcgggatggaaggcaatatggaccagcttcttcagaaggtgttttgaacacatatgatacacgtagttttggatttttttatgggaacttctcactcatagtatatctcccaactgactcatgcagataatgtcagtacaatcaaagagtgatggggtcaacacttctcttttcgaaaagagagaacatatagagaaactgcaccggactcgtaatcttcttcgtaaagttcaggtatgtaatgagtcatttttgctagcttatatatctgctgtgttgtcacctgatcattatagcaataatatgaatttactcaaattaatttttgtgagaaagagcagttcatctatgatttacctgcaagactgcaaaaatgtatcaagtcagaagcctatggcgatgctgtcaggttctatactggagcaatgccaattctcaaggtttacatctgtcctcggataacttttccatttttttgtagtattcttttcatgttactggggcatttaacattctgaagatatatatgtggagatatgtttaaaaatatgaatttctctttctgttcaggtatatggcgatacatcattccaagactgcaggcgagcttccgaagaagctatagaaattatcataaagaacttgcaggtataccttttggtcctagtagtctatacttgtctggattaataaaaatctacatacaatactggcttatcaaccatataaacaaataactggtctttatgttttgtgtttgttatttcttgatgcaagaaacctattttggcttgtttgacagacgaagctattttcagattcagaatccatacaggcgagagctgaagctgcagtgcttcttaagcagttagatgtccctgtcagttctttctcttagctcaattatctgtgacttgtttaagttgttatagagctacctagaacgttcgtaatgttcatccttgtacaactggtttatcactggttgtgacataaatttggattgcacatcctgcaggttgatagcttaaaggctaaactgttggaaaaactggaacagtctcttgatggtcttcaaataaagcctgaggaggcaagtacacttgtagaggacgatgattcatctaacgatacagaaagcaatgaccaacatcctgctaaaattcatgaggtaaacacggactatgtcgcttccttatcctttgtgtttttgatgaatgcaagttggaacacagtcaaactgactgtatctattaagcactttgaatatccgcagctgctttacaggagattttctcattagccaccatattgagatctcttttcttttatttcatttggtttatcagacttgacgagctttttatttgcacttttgatattttaatggttgtccccttttttctgataggatgccgtacgtggattttctgaggccatacgtgcttatcgagaaatattccccgactcagaagaaagacttttcaaactcgcgagagccttaacagcaatgtaacgcacttttctttgatatattgatccataaatcgagactttgtttgtgtctgacctgcagaatttctaacacttatggttgttaggcactttgagtacatggagctatatataaaaaaacgggtttctgcagcagattttctaggaatttttcgtgagtacagtgaatttcctcatgcccttgtctcttttttatgttgctttcatttcttctgaaagctttggttaaatcagtctaatgaacatatataccctgtctgatttctgttggacgtaggaattgtatgggaagatgtggtacttatggacgaggtgctacctgaggctgcactctctgatttatctgcagaggttgaccctcatttatgttgtgtggttctatttttcgttataatgtgtagaactatatatgattactagcactcctcatttcaggctgcccaggttactcttaagcaatttgttgcgagaatgttttctcatcttcaacaggatatatcaggttcgctgttttctaatttctactggattcagaatttcttagtgagggaaaagagagaatgagtgtagcttcacttttcataagaacttctgtgaaatggcctttaagtaatttgaagagtagattaatctcttcgtgaagttttagtcttcaaatgaaatagaattataatgaggtatatatatacatggcagatactctcttgaaattcgatatcaaccaaaaggaagcagttgaaggggaactcttgaaggttgtcctggaagctagccaaaaagcagtgctacaaggcaccacaaatatatttcaggcacattccttcttctgttatttattatattttggctgttatatcatctgtatgaattccatgctcaaaaacgcttatattcgttctatcacttcaggacttccgtcagcttcttgatgaaaaaactggaatatttataaagatgaaggatttaatcagtggttggattcagaaaggatctcaagacttcttcaggtcactagaagctcaatttctagtgctttctggaaaaactagctcatcaaacgatatagagggaaaatcgagtgacaaaattcatgctggtctcattcttgtattggcgcagctctctgtcttcatcgaacaaaaggtcatcccgagagttactgaggtgagattcttacaagtagttttgcataaagtttaaatcaattggtagctggttttgagaaatttcatatgcttattcaggaaatagctgcttccttctctggtggaaattcccaagcctttgagaatggacctgcttttattcctggagaactttgccgggtcttccacgcagccagcgagaaacttctccagcatgtatgaatgaaactccaaaacttgaggtcgtttaccaaaacttaacatcaactaactaaatcatttcatatttcagtacatagacacaagaacacagaaggtatcagttttactgagaaaaaggttcaagacacctaactgggttaaggtattgctgttgtggtgtggctaatcttcttagagaagcattttaccagtcattgttttttaattccaaatattatgcagcacaaggagccacgagaggttcacatgtatgtcgatatgtttcttcacgaggtttgacaactcttctcctcttaacctggaaattatctaaagagcatgcaataaatcatatttgtttggattttctacttcgcagttagaagaagttggtaaagaagtgaaacaagttttacctcaagggactttccgtaagcacaaaagaacagacagcaacggaagtaacactacaacctcatcacgaagcaataccctccataatgataagatggcacggtcaaattcacaaagagctcgtagtcagcttttcgagacacatcttgcaaaactgttcaagcaaaaagtagaaatattcaccaaggttgaatttacccaggtaaaaacgaaagaggttcccttatagttatatcaaacgcgcactgccacacgctcatcatctcctgatctcttttcgtgctaaatatttgcaggaatccgttgttacaacaacagtaaaactttgtctgaagagtttgcaagaatatgtccgtctccaaacgtttaaccggagcgggttccagcagattcagctagacattcagttcttaaaagctccattgaaggaagcagttgaggacgaagctgcaatagacttcttgctcgacgaggtggttacacctaaagctccttcctttacttttcttcttattaccatcaagcagaggctctatgtctatcttttgcaactgaccattgattctccgaccatgatgtgtgtttgtattgacaggtgatcgttgcggcttcggagagatgtcttgatgtgattccattggagccaccgatcttggacaaactcatacaagctaaactcgctaaatcaaaggagcacaacaacaacacagtttcttcttaaaagttttcataactcaaacaaagtatacatgatttttgccaatttatttccgcttcttgttatcatccgtagtgtaaatcaaaaccattgaattgtactctctagcattgaaccagtaaaatctacaccgtaacttcttctttacttttgtgaacaaatctttgaatttttttttttagcaacatgcaatttgacttaaaagatatgtaaaaccctaaaactaaactacataaattcctaattacactaaaaccctaaaattgagtgccgaaaaaatagaaaaaatattcatagtcacggcctcacgggtctctctattatataagaactccttgagacttaaaaaaaatctcacattccctctctctaatcaaaaagctaaaagcaatggccactgcgatgtcttactcttctcaaaaccatcgattcgagcaccaaaccctaatccaccgtaaccctaagcctcgtctttgccgcaactcttcaacagctcctcgccgacgcaagcaaagccctacggttgttaaatctccggcggcgaatccaaatcttgtaatggaacaagtcaagatcctcaaacgcggtgagacattgagcgcgtttaataagaacaaggaaaacattagctccgacgatacaagacgacctgttttgaagatgataaaagatgttgatctgattgtatcggctactaatagaattggacctgaaccagagattttgatgaaacagatcggagctttgggattgcagagcttcgccggagctaattgctctctttcgccgcctccaagctgtgttccaattccatgtttcttagggacgaagaacaatctccttgtttagatcatctgatttggggaaaacaaaaaccctaaaatcgaaaccgtcttttgatggtctcgtaagagcagatgtgtgaagaaatcctgagatagagagtaaacaaatctctttgtttatctcaaagaagaagaagaagatggagaatgtgatcacaaaacgccaattgcaaccaaaatctttactctgtaatcgagtgttttggtgtaacagtcactgtgactattttcaatcgcttttttttagttttgtttcggattttgaagtttgtagttgtcactttcacatgggattcaaatctctccttatgcaataaaaaaccttatagtaatacaaacataagtttcttgaatcagtttatattctctttaaacagatacattcttgctctcatcttcaagatttgttgcatcaggtaatacttttttccagaaccaatgtttactccataagagtgtcatctcttctattggaactcctttggtttcaggcaacaggaaatacacaaagatagtcattactgtcacccaaccagcaaagaagaggaagattccaaacttgaatgcacagaggagaccaaggaaagcttgagctatgatgaaagtgaagaggagatttacagctactgtgatactctgccccgctgaacgagtctctaacggaaagatttcgctaggtatggtccaacctagaggaccccatgaccatccgaacgctacaacaaagaggcagatgaagatgactacgatcactgagtacccttttgatagctcttggttgtctccaaatttcactcctaagatcactgctactatgacttgacagattatcatttgtattcctccagttatgagaagagctcttcgtcccaatctgtctactaatcctatggaaataaatgttgataggacaagaacagctcctgttaaagctgatgaatagagagatgcgtttcctccaaaccccattgtctggaacagaacaggtgcgtagaagagaatggagtttatccctgtgagtatctgaaacattggcatgcaaatagccataactagctgaggcctgtgtcgtttctgcaagatgtttctgaatggatgtttgatggaattcgcaagctcactcgcatctaccatgtcttgaagctcggcgttgacgttttctgttcctcttagcttcactaagactcgtcgacctctctctgttaatcctctttcgaccaaactgtttggtgtctcgggtaagaaatacccgccaagcgtcataagcagagctggaaaagcagctaaaccaagagagagtctccatccccaaggcttaagctgttgagtaccgtaattaaccatgttcgctgtaaagatcccgatagttgtagctagctgaaacatcatgtttaaaccacctcgtagatgagttggtgccacttctgataaatacaaaggaaccgcctgaaagcaaaaaccaaagcaaggtaactttcattagagatgagattggtttattattggtgacaccaactaaacaattgtctaacctgatttccaaatccaataccaacaccaagcatgatccgtccggcaagaagcatagctaagttcacagctccagcattcaaaccagatccaataagaaagctgattccaccacaaacaatactcgcacgcctaccgtagttcctagtgatgggtgaagccacgagagtcgaaaccaaaccagctaagtagagtgaagaagtgaaagcagctaagccttgattatcatatttgcagtaattactttcatgagcttgcttcttcttctcataaaccgtgtggaaaaactcctcaagaaactcatccatcgatgtaactcctcctgcatacaaacaaaaaaccatttcagccattgtttgataagattattaagaaattggattcaaaagatgaagaaaagaacctgagattccaatgtcatatccaaagatggatccaccaatagctgcaacaaggcaagcgattataacataactagtgactttcccttggtattgttctgctctctccttagccacaccggtcggaccaaacgaccctcctgccattttcttttcttcttcttcttcttcttcttctgctactactttgcttctttttaagagtttgttgcaacggttgactttttttcttgcttttactcaaattccagaatctgagagacaacgaaacaaaaagggttatacacatttacatcttcacgtggttagatagatttcaatttggttaggttttgggaaaattttaaatgtgaagttttgccactttgagatttgtgataattgcgtatggattcgtgtttggtacataattgtttggaattaagttccaacaagtaaatacgtcattttcttgaccttatcttcacataacaaattaaaaatttaatactgattttgcatgtcttcctcctactttgatctctatttccacaaaaatcatcaatgctcgttggaatattgtcagaatatactaatgctatataagaaaacaaatacaaaaagaggttttatacttttttggtcaaatgtcatcttcataataaaaaaaaagattacgatcttatcccgttctaacaagtaacacctcggaaaaaaaagaaatcaaaatccttcctagtaaaaaaaaaaaaaaaagttggtttcagacagaaagtgaagaatcaagacaagtgtgatgattttcgtcataggttgaaagaaaacagattaaaaaaaaaagaagaggacttacaggagaaagaagaaggaagatgtaacgatttgttgtagactgggaaatgattcagacttgtgtgtgctatttattccatggattttttgatcgcctactatgaaggcgatgttaaagatgatgttgaccaagttttgatcaaagtcgaatacagagagactaaatatacaacaacaaaaaaaaaaatcaaaagctttaaattcacacacacaaatttcgatagtagctatggatttaagacaagtgtaagaagaaatcacactagttttcaacgtaaggaggatgatgaagatgacattattgtatccacatttgtcacccattttttggaaacagatgataatattattaaatctttggttaattaaatactaagggaaagaaataacacaaaagtggttgtagtatagcggttagtatcccacgttgtggccgtggggacccgggctcgaatcccggcagccacactttttgttacctcttcttttttatttccagcaggggtagtttcgacattacattaatcacgtgatcattagatctggaccgttcattttactccccgccatttctctctataatacttttcccgcctaaactcatcgtcatctacaacccttttaccgcccaattttgcagtcactggttcattcctttctcttcttcctcttccactctctctctcgacccaagttttgaaaccatgaaagaccacgatttcgacggcgacaaaggttacattctctcttcttctccgttctcgataatcttttccctcttttttcgctgagttttgattctcactttttttcttcttgtatatagggcttgccaagggatttctcgagaatttcgccgacgctaatggcagatctaagtacatggagattctcgtaagtctcatttccaatatcttccaccaatttctctcttctagggttttcgcgaatctccctaattttagggttttatgttctattttatgaatttgtgtagcaagaggtttcaaatcgtaagattcgagctattcaagtcgatctcgatgacttattcaatgtgagtttttttttgtttctctctaatgttgtttctgttttggatgttgctattgtagaagccactcatctcttttgatattgtgtagtataaagatgaaagtgaggagtttctcggacggttgacggaaaacactcgccgatatgtttcaattttctccgccgctgttgacgagttgttacccgaaccaacggaagcgtttccagatgatgatcatgatattctcatgactcagagagcagatgatgggactgataatccagatgtttctgatcctcatcagcagattccttctgagattaaaagatattagtaagttttgtctgagtctatttgctggacataagctttagggaatgagttttacaatagtttgctaatgaatttacttttattcagtgaggtttattttaaagctccttcaaagggaaggccatctaccatcagggaggttaaggcttcacacattgggcaacttgttaggatatctggtattgtgacccgttgttccgatgtcaagccattgatggcggttgctgtttacacatgtgaagattgtggtcatgagatttaccaggtacaactatgcttttgccagattgtagtttcttttttattttgttaactactaactctgattattttcttttacatgtcaaatcaggaagttacatctagagtcttcatgcctttgtttaagtgtccttctagtcgctgtcgtcttaatagtaaagccgggaatcctattcttcagctcagagcatcaaagtttctaaagtttcaggaggttctgtttctggtcaatgagtgccatttatgtgaatgcactgatatcaaactaatgagtaaaaaatcattgtcttgcaggccaagatgcaagagttggctgaacatgttcccaaagggcatattccgaggtctatgactgttcatctaagaggagagttgacaagaaaggtaccttttcttgacctcagtctcatgctactattggagtctatttgttctactttcggaatcaatagctcggttgcttaggaatagtccaatgagaagttgttgttcggcttaaaagcatatgctgaacagttgttgattaagaggatttttttttccaatgttgtactgggactctatctgtagatattgtgatatcagcgtcatttactatcgtacaattgtgaaattcttactaaatttccttaaacccttgtaggtatcaccaggtgatgttgttgagttctcagggatttttcttcccattccttacactgggtttaaggcacttcgagctggcttagtagcagacacctatctggaagcaacgtctgttactcatttcaagaagaaatatgaggagtaaggcgttgttacacctttacactaacgaaacattctgatttagtaacctattccatgtttttctgcatttgcttaagatacaaagcagctttcgtgtgtgcacaatatcagaaagcatctttatacctttttcattatgatctacagatatgagtttcagaaagatgaggaagaacagattgcacgtttggctgaggatggtgacatatacaataagctgtcgcgatccctggcccctgagatttatggacatgaagatattaagaaagctttgcttctccttcttgtgggtgctcctcacaggcaattaaaggatggaatgaaggtgaactttcctgtcctctgatttattctggcaaaatttccatgatattgctatctattatgataaagagtaaagactgtacactgattagaaagcagttgcttgctttagttcatctccgactatattgttttacctatttccatacagtgtccgcagtcttcattgattgagttatggagctttattatttacaaacatgttcagtcattcaagagcacattgcacttgattggaacacattttatctgtgaagatttaaaaacaatacattcattaattatcttttgcagattagaggagatgtgcatatctgtctgatgggtgatcctggagttgccaagagtcagcttctcaagcacattataaatgttgctccaaggggagtctacacaacaggcaaaggtagcagtggagttggtctaactgccgctgttatgagagatcaagtaacaaatgagatggttttagaaggaggagcactggtgagagacaatgcccttttgctttggatatattttagaaaatatgatgtaagagctatgtgatttagaagtttgatacaatctctatctcaggtgctggctgacatgggaatctgtgcaattgatgagtttgataagatggatgaatcagatcgtactgctattcatgaggtcatggagcagcaaactgtaagcattgcaaaagctgggattaccacgtctttgaatgctcgaacagctgttcttgctgcagccaatccagcctggtaagtgaactctcatgatatgaattaaaaactcatgaatgttgagtgatcattgctatcattattgaactatgtatctttgtgtttatgaaggggaagatatgatttgcgaagaactccagctgaaaacattaatcttccaccggcccttctttcaagattcgatctgctgtggttgatcttagatcgagctgacatggacagtgaccttgaattggcaaagcatgtgcttcacgtacatcagacagaagaatctcctgcgcttggtttcgagcctctggaacccaacattctccggtaagttaaatcgcttttacagcattcttgttctgcaaagtcagaaactttaacatgagcatatttggttctctagtgcatacatttcagctgcaaggagattatcaccatacgtcccagcagagttggaggaatatatagcaactgcttattccagcatcaggcaagaagaagcgaaatcaaatactcctcattcttacacaacagtgaggacactgctcagcattctgcgcatatccgctgtaagtagaatttgtgtaggaacttgagtaaattagttggactattgagtgttaatatatttccgatttgttctataggcattagcaaggttgagattttcagaatcagtggcacagagtgatgtggatgaggcgcttagactaatgcagatgtcgaaaatatcattgtatgctgatgaccgacaaaaagcaggactagatgcaatatcagacacatactcaatcataagagacgaagctgcaagatcaaaaaagacccatgtgagctacgcaaatgccctgaactggatctccagaaaggttagtttcttccttcatcttcatcttcatgttctttctgaaaatggatgatcactgagacgagagatttggggtgtgaaaacagggatacagtgaggctcagctaaaggagtgtttggaggaatatgcagctttgaatgtttggcagattgatcctcacacctttgacatccgttttatctgagtaacaccacccaaaaaaaaaaaatggaaacaaaccaagtctctcttgttatgttgtgtgctttatctctattatcttatcacatttcttaacgtagagaccttagaagtggaatctatagaagtgatctcttgattgcagaacaaactttacttttggaaatttagatgtgactttgtactcttgcagttcttttcactctcgcaaatttactacggttttgatctaggtttgattaaaacacttcttagtctaattttgtatccatgtcagtaatatactttcagtttggtataatttgatttcattattacaatcataaaatattgtaagtaccatgctaacatattttcaaaaaaattctaaaagtggaattttgggatttttatgacaattttggaaaacagaacaattttcggtttagtaacataacagatcggttctggatcggtttaagaattaatgggccatattattatacttttaagcccattaatacagagcaaagcccatttacgtcgttgcaatatctcactcactccataagcttttaacggcatgaataattcgattttcgagatggcacagagagagagcgagtattattactagagcgttgtttcccgccaattagcaactttcgccggcgtattttcccggtgaaaaattcccgcgcaatctcttcactccataataagcttctctcatcaatctcgctctcttcgccgactgtttcactccccttctctctcactctctgtgcgctttattccactctccgatggctccgtctcgccgacagatcagcggaagatctccgttggtgaaccagcagcgtcaaatcacctccttctttgggaaatctgcttcatcatcttcttctccgtctccatctccttcaccatctctctccaataagaaaacccccaaatctaacaaccctaaccctaaatctccgtctccgtcaccatctccgcctaagaaaacccccaaattgaaccctaaccctagttctaatcttcctgctcgtagtcctagccctggtcctgatactccttctcctgtacagtccaagtttaagaagccccttctcgtcatcggacagacaccttcgcctcctcaatcggtggtaattacttacggtgacgaggtggtggggaagcaagttagggtttattggcctttggataaaaaatggtatgatgggagcgtgacgttttatgataagggtgagggtaagcatgtggttgagtatgaagatggggaagaagagtctttggatttgggaaaggagaagactgagtgggtggttggggaaaaatcaggagataggtttaatcgattgaaacgaggcgcttcggctttgagaaaagttgtgacggatagtgatgatgatgtggagatgggtaatgtggaagaagataaaagtgacggtgatgattctagcgatgaggattggggaaagaatgttgggaaggaggtttgtgagagtgaagaagatgatgtggagttggttgatgagaatgaaatggatgaagaagagttggtggaagagaaagatgaagaaacttctaaagttaatagagtatccaaaactgactctagaaagcggaagactagtgaagtaacgaaatcaggtggtgagaagaaaagcaagactgatacaggcactatcttgaaaggttttaaggcttctgttgtggagcctgcgaagaagattggacaaggtaaaccgaagagtctcttgttgtaatcatatgcttgtatttgcattgttttagtttgtggtatgtctcttgcactgacttttgtttcagatagtgtatgttgttggttgcttaatattatttgtgtcttactacagctgatagggtggtcaagggtttggaagataacgtgttggatggggatgctcttgctagatttggtgctcgtgattctgagaaattccgctttttgggagtgtaagtctttcacaaaaaaaattccatcttagaggctatttgctacggtggttaggagtagagaatgtaaatttgtgtcttaagcaatattgacttctctactggcaggagcatctctggttttcttttatcttcatgatgtattagtaggctgcatgatccctattctagctaagttagttctgttaattatttttggtgaacagagaccgaagggatgctaaaaggagacgccctactgatgagaattatgatccgaggacactctacctccctcctgattttgtgaaaaaattaactggaggccaggtcagaagagcgcatggaaatctggttcaggatttttggtgaagctaatcaactttcacttatatgattttgtggccttttttcagagacaatggtgggagtttaaagcaaagcatatggacaaagttgtattcttcaaggtagaacgataattacttatttcgttataacttatttattgatgggagattctaggataaatggtcttcttttgtggcaagcagatgggtaaattctatgagctttttgagatggatgcacatgtcggagctaaggaactggatatacaatacatgaaggtaactgtttgttatgactcataactaggtgatgcatttgaagacatctgttaaaaatgttaaaaaaccgaaaatttggcatcagattatgctaaaagggttcttttcattggtgttacattacaaatttctcctgtattgtctctaatgtatctctctttacaagcccctgacatatgcatttattttgtagggagagcaacctcattgtggatttccggagaagaatttttctgtaaacattgagaaattagttagaaaggtttgtttccagaaatatagcaactccagttcaagcgtgatctatttcttgttacgtgtagagaaattacattcatggcaaatgctgtactttgggtagaaataaagttgattgaattgaatggaacagggctatcgggttttagttgtcgaacaaacagaaacacctgatcagctggagcaacgccgaaaagagacaggttccaaggataaagtatgtcccactatgaatctaatttagttggcattatcagttcaagtcaatttgtttgctcttgaaactaaaatttgttcactttgggtgatgcctatgtagaaaaattatgatagggagggctcatagtgacagaacttctgtttttataggttgtgaagcgcgaagtatgtgcagttgttacaaaaggcacgctgacagatggggagatgctattaactaatccggatgcatcttatctaatggccttgactgaaggaggagaaagtttaactaatcctacagcagagcacaattttggtgtatgtttggttgatgttgcgacacagaagataatactgggccaggtgagttctagttgatgaatggtacctggttgcacttatacgtaacatttctcggtgtatattgatggcatttttttttcattcgtaccagtttaaggatgatcaagattgcagtgcattatcttgcctgctatctgagatgaggccggtggaaattattaaaccagctaaggtgttgagttatgcaacagagagaacaatagttagacaaaccagaaatcccttagtaaataatctcgttccactttctgaattttgggattcggagaagaccatatatgaagttggaattatctacaagcgaatcaattgtcaaccgtcttctgcttattctagtgagggaaagattctaggtgatggttcaagctttcttccaaaaatgttgtctgaattagcaactgaagataagaatggtagcctggcactctctgctcttggtggtgccatttactacctgcgacaagcattcttggatgagagtctgcttagatttgcaaagtttgaatccctgccttactgtgatttcagcaacgttaatgagaagcagcacatggttcttgatgctgctgctcttgaaaaccttgagatatttgaaaacagtagaaatggaggctattcagggtaaagtttctctatcttaccatgtattattaaacataattgatgtgttctaaatctagagtgttgtcttttgaagaacgctgtatgctcaactgaatcaatgtatcactgcatctgggaaacggttactgaaaacatggctggcaagacctttatataatacggaactgatcaaggaacgacaagatgctgtagcaattctgcgggtgagtctttcaacaagttgtttgactttgctgctgtcatttctctgtctctcaactagacaataacttggcatcttggtttcacatttgatcatttttcatgtctgtttcgctatccatggatctctcctcagaattacactatttccccattatgggtgttcaagaccatttttgccactgtttcactggcaaagatgatgttttcctatgcgttcaactaaccatctatttctagaacttattccctaagattataaaacttactctgcttcttcagcatgtcaaggctttcgtttacactatccatctgacaatgtattatggtactgtcccttccctcagggtgaaaatcttccgtactcactggaattccggaagtcgttgtccagacttccagacatggaacggttgattgcacgtatgttttctagcatgtaagggattagctagattgagatgttaattcttacattatatgtttataccaaagacttactaaacatatttgttaaacttgtgttacgtgttatagtgaagctagtggaagaaatggcgataaagtggtgctatatgaagatacagctaagaagcaggtacaggaattcatatcaactctacgtggttgtgaaacaatggcagaagcatgctcttctctccgtgctatcttgaagcatgatacatccaggcggctgcttcatttactaactcctggtataatcaatttgctccatattcacattcttatactggcaaattgcacagcatctcatatcatttctctgccaggtcaaagtcttccaaatatatcatcctccataaagtatttcaaggatgcttttgactgggtagaagctcacaattctggacgtgtaataccccatgaaggagcagatgaagagtatgattgtgcctgcaaaacagtagaagaatttgagtccagtttgaaaaaacatctgaaagagcaacggaaattactcggagatgcatcagtgagaattacttcactatttttttttactccttaaatggctaatcaaccgagggttttctgatcagatctttggtgctcttttgtcttcttatccagataaactatgttacagttggaaaagatgaatacctcttggaagttcctgaaagtttaagtgggagtgttcctcatgattatgaattatgctcatcgaaaaaggtaaaagttgtaccaagtttcacattctaaagaaattggcatttcgctttcgtcataacaagtcgatagtcttctcgtaattgctgtctgctgatatatttactatatagagacccttaattttaaacatgagattttcttactttttactctctttcagggtgtctctcgatattggactcctaccataaagaaattattaaaagagctatcacaagcaaaatctgaaaaagagtcggccctgaagagcatttcacagagattgattggacgtttctgcgagcatcaagaaaaatggagacaattggtttctgcaacagctggtatggacaagttcatgttttaaaaaaaaaaaattgtttaaggaattttcagcatcttccttcagaatatgtatcttgcttatccaattcctgttaattactgtcacccagtgttagctttgtgggtcgtcgcttggacccttttcgttgtgaacatttgttgagctagttagaattgagtttgatcccacactttatagattgagttagaagtaggcatgcagaagaaaatgaatcttaggcagacgtatagttcaatcacatcttataagcaagaggtttcttgggtggaagattgttttatagaattaggcatgcaaacaactttgcacttagacctttatgtggatacatttttgacatgaattctttctattgcagagctggacgtgttgatcagcctcgcttttgcaagtgattcttatgaaggagtaagatgccgcccagtaatatctggttctacatctgatggtgttccacacttgtctgccactggtctagggcatccagttctaaggggtgattcgttaggcagaggctcttttgtaccaaataatgtaaagataggtggtgctgagaaagccagtttcatcctcctcacaggccctaatatgggtggaaaatcaacccttcttcgccaagtttgcttggctgtaatcttggctcaggtaagctatcatttgaaaaaactttgtaggcaatgggctttgacccgtttaattttgatgaaagaaactcaagcaatgatgatcttttcacagattggagcagatgtcccagcagaaacctttgaggtttcgcctgttgacaaaatttgtgtccggatgggtgcaaaagatcatatcatggcaggacaaagcacgtttttaacagaactttcagaaactgcggtaatgttggtaagtaatgttcattctgtttgtcaaattgattacatgaagctttctaagataaatgtgaaacttgccacagtggttacccttttgagagttggtcacaggctttgttaaactatgcgaatgccaacaaacgcactgatagaatgttttatattaataatatgcagacatcagccacccgaaactcgctggtggtgctagatgagcttggacgaggaacagccacatcagatgggcaagccattgcgtatgttgaatcaattattgcgtatcatgttttttgggacttactgttattgttcactttatctaaaatatcttaactatttacagggaatccgtacttgagcacttcatagaaaaggtgcagtgtagaggattcttctctactcattatcatcgtctctctgtggattatcaaaccaatccaaaggtattgtgaaaagtgtctgcttcagtttctgggtttgaaagacttgagaactatcaataataatctgattgtttgtgtacattctgaaacttgtcaaaaaccgatcagtcttgaatatttgtttggataggtctcactttgccatatggcatgtcaaataggagaaggaatcggtggagtagaagaagttacatttctctatagattgactcctggtgcatgtcctaaaagttatggagttaacgttgctcggttagctggtaagaacactgaattctctactccatcacctctactcagttaaacagaagcagtcactcatcaaattgttttggttttaatctccataggtcttccagattacgtactccagagagccgtgataaaatcccaagaattcgaggctttgtacggtaaaaaccatagaaaaaccgatcataaattagcagcaatgataaagcagatcatcagcagtgttgcatcagattctgattactcagcttcaaaggactcattgtgtgagctacactccatggccaatacatttctccggttaaccaactaatttaacagctctacgcctttccggtttgtcgttcttcttgtaactctttaaccaaggtcaatccacgagcttcgtcgtgtcaaatactaaaacctgagtcagcctgaaactaaactcctgagtagagactcagttttgaggtgtgggtttagcttctgagtcttttttctcaagtttttggggttttcatactctgtatagtagaggatcggtaattttgtgaatatatgttcgttgagtactcgcggattctgtcttcacttgaattggtgaaaaacaagtagacaacaattattttgttttaagacaattatcacaagtatcaaaatagtgaaattttagttataattgacaaagaaattactcttgtttattacttcttttgtttttttaagaaaatattttttgttagaagtttattaaaacaggatgacaatttgataatatgtaaaataaacaaacgcgaaaaaaataattggatgtttcttgtgtaaatttacgttttttatttgactttgtgagtaaaaatgaccatgagcatcaaatagatgcttttcgtttaaaaaaagaaagaattagaaagaaagaaagaaaaaatttcgttaagttcgttaatttgaaggtttaagccaaatgttgttgttgctcttcatcttcttcttccaagtcatcgtcgtcgtcagagctcaacctatcttcttcttcagattcctattttttcaaaagtcaaacatatcaccaaaagtcaacaaaattgagagaaagttgaaaatttcacatttggcattaaatgatgaatggtatatagcgtctttagactttttttgtgtttgatatattcaaaaaagtcaaatttcgatttcaaagatttttctcccatgatcacaaacaaatcctcaaaacgtggtacctatacattcgtaatcgtactcgcatgcgtgaatgttaatattcacatctcacatgcattttattttttgaaatcatatattataatatggtcaatcatgtactaattaatatacatgcatatttatgtgtgtgtatatatgagttttatgaactttaataaaagggattggggaacgaacttacaggatattgatgacgacgacgaagagttttctgaatagttgagattgttcgaattataatgaacattggcaatagtatcccaatggcctttaatgttagtacctgcattcattttcatccacccaattcttttaccatcagatcatacagtattaatatacatgtcaaaacaacattaaggattttaatgattggataatcaaaaggaagagcatttttaccgtaaatacagagaatggatattcttcggttccgtaaatcacatcgaatgtatgtttcatcagcaaaaatactgaaagctgcaaaaaaataatgtacacattagtattatttctcacaaaattagtccatatgattcgacccgcaaaatagatgtcgttttaggattctaatgtaaatttttgatataaaaatatccaatttgtctgtaagtcaaactaatatatatagaaatataaaatatgaaatctcataacgacacaaccgaaccgcatcatatcacatatgtaaacaatatccctcgagattggctcgtttgaactttaattaatttcggatgagaaaaaataaagaacgacacaactgaatggtagattgagatatgaaccaatacagatttggtaaagggtaaagaaaatatattggtaggagttgtggtcttaggtgagacaaggttttgtatattgtaaatgaggctaaaaactcaaattcttggccaaccaccaacttacccaacctaagtgtttcttttctttttaacaacatttccaaccattaaatattatatattttttacctcaattttgaaataaactcgaaaaaaggttgaccaaattcttgtcaaaaactatggaggagaaatagcataaatcttcatactaaatggtagaagactatgaacatggaaaatagtgagaaagtttcataacggtaacatgtacatttctttttgaaaaagttctttttcatggtgggaaaagaaacactataataatatccattggccacacacaaacaaacaaaagatattcacatttataggctttgccacatagctacgaaatagatttggccaaaaaagcaatgaaacagtaagtagtggttgccatatctatttcagagctcccctaaactatggacttttccccatctctcatcatttgttttaactaatttattattattatcactaatcactttctatccaaaactaaaattcattaagaaaaaaaaaaaacttagaaagaaacttacagtaaaagttaatgatctgcaaaacgaagctcctctatcagcaacagaattacactgagaaatatcggattcagctatagacactaatcttctacttcttcttcttcttcgtccatttactctgttacatcaaatacaaatttggagttcttgatattattattagttgttgaatatgagtaataataaactaagcataattattctccatacgcgtaaacaaaaggaaagaatcaggaaaccacgtcaatggggtcaattatttgcataattcactctattttattttccttcttcttagcaaatatatttacctgattgtgacttcttgttcaatcaatttcgattgttttaaaactgctgtatatccatctttatacacctgcatggtttctattattattagtttcctcattttcataatttaatttttctatcattataattttatttctaaaaaccaattatcatctttggtttccaattttaatttttaagttcactgaatttagaaagaaaaaaagctaataaacagaaaaagagccgtaataagttcacaagtgattgcgacaatcaaaaaatttatttgtttttctctaatgtatcattattattatagatatgaaaataatttgacgacaaaaaacaaacaaggaagaaacagtgacgcattaagcaattcaagaaattggagacaaaagaaaaatattaattatcttgaatccagcgaagcgcacatcacacaaaattaaacataaatacttttttttcaaatcatttcgaaaccaaaaaaaaaaaaaatgatgatcggaaaaattgataatcaaaaagcaagaaaaataaagtacctgaagacagatttcacaagttgtgtttcctttttcattacaccaacgttgtatgcagtttctatgtgcgaactgatcaaacaaaacaaaacaaaactccattagtttcaaattttgagagttaagagtttttttcttttcttggttggttcttttaccttaacggtgcctgaacaagcacatggaacttcgaagaaactttcttcttcttcttcatggcaaattctgcaacgcgtgattctcactttcgatttcgtatcatcaatgaacaaaatcacatctcccatctttatcgatggttttgaattttctgtaaatttcttcgtggctctgttttttttttttttttgaaaaactttgctctgtttttgttatcttctgaagaggagctttaggcagaggggtctgcaactttatatacacagctttttcgaattctctattttacccttacttatatttcttttattcaaattccaatatcatgtttttaacgtctaattcagtaattcccaataaaatcattttccctagctattaacatgtgttttcttctttcttcttccttggaaaattaaaaaaaattgttttattcttgtttatgttaattaatagaatataattaatatttattttgtattgattttatttatttgtagtaaaatttaattgtggtttcaatataatgattttaattttagaacaaaatttgttgtagtctaaatagattaaaatccattttttattatgaaatttttgttcatttttaattataagattttcatattaaaaaaatttgaagtaattatttttggtaagttaaaaattcttcaaatatgtttggcaattgttattagaaacttagaatcatcaaaatagatagtatatggaaataaaggtgttaagtaaaatagatgagaaatattgtgagcttgccatatgagcataaaaatatctcttttaatatatcaaatatttacaaagaatataattaattttgaacttaacaagcatccaaatttaaaaatttgtatacggtttagtttggttattttgtcgaactatttaatttttctggatataataaatttaaaacttttaaaaatatgaaatattataagtgatatatttaaacttaataatttttaaaaaataacatgtgatgggttatattgttggatgtgttatatgacaaaacgagtttgaatagacattagtaacaatttaaaatattattaatctaacattgcaatacatgttaaatcttcattttgttgttttcttaacaagtcaacaccaccaatcttagacatgttgaatcagattgatttaattaagattgtgtgaaacataaaattccatgcggtatacttcgagttaaatcctagttatgtagtattttttacatagattaaattattaatttataaatgaaacgatattttttgtgaagaattttttttttttttgatattagctttttagccaaagaatcttataaattaggacaaagagagaatatggtgtgcattattgcatgaaacaaagcaggatttaaatcatgcatatggcagctttgacgtgtttcaagaactttttttatggttttagtgtttcaaattcaagaacttataatactactaggaagaataactatggggttttataaatagtatatccataacataaagtatacaactttttttttgagaaactgagtataattgtttaattgagttttaaagtatatccataacataaatgagtataacgaccaagaaaaaagatcaaaagttaataaaacaaaacgcggttatgtaagagctggaagaatgattatttcaatttaagagttcaggcaaaatgaagtaatgtataattgtcaactatgagatctcacaagtcaacacaagcctcgacttttctcatttctttctttatgaacataataaatggaaagaacttaacatatattggttttagttataatttaataaactttgtttgatgtatttcttttttaaacgaattggtttcttgtgcaagtagaagattgtgatagttgagaggatctattggtaccttcacatttttacttatttttgggctcaacaacaacttaagatcctaattcgaaaaagtgatttcttcacttttgtacttggtgacattatattcgaatttatttcagtataggaaatattaaaaaaatattttctagtttagtggtgatgaccgaataatagaatgacaatgtacgtctcaaaatcaaaactcgcaaaaactaaattcgcaacgatttgttatccgtcctaaaaataatatggactgcaccgctgacggattaatccgcactaaccacaacatccattcaaagcataaaaatgtttgattcttgttcagaatttgaagcatttgtttatgtattaataagattctgcttacatatatcttttgattggatgatgtctattggatatgcatataactgcaagaatagttatataaaaaaaacttcaaatcactatggtcttatatctaaaactcaattaccctaaaaaataataatacattaggttagctttcatatcacaaaaactttttaacttgtcatttcttgcccttctcttagtattgcatttttgtatttggattaattacgtcaaaccataggattgactagttcagcaacaaactaaatacacacatcataataaatgccatcaaatttcaatatcttcttggaattgtcgatttatacattctggccttagaaagttcattttgtcaactagtatcttaactaatcatatcaataatacgaaagaaaaaaacacttaataaaatactaagatacaatctcacaaagaggcaagaaccaaactcaacagtggatgaaaaaaaactccaaccacaaaaataagcgataatattctgattttcaagccttaaatatgtgataaactgaaatttaaactcgatttagctaacaacataaaaaaaagtttaggtaacctgatagtgactatttatcattatttttttgtggacacagaaaatttatcatgtaactcatattatataacaaaatgattgtgcaatatgtgaaactggaacgaatttgaatatgaagcctaataaggctcacgaattctatgattgctttatcaacggtcgcctgatcagctggtgagtacaccagaaatttaaactcgtgggtcctatttttatttttaaaaataatcagtataccaaaccaaaaaacccattacaaaatcttatgattattagtgttcctgaaatttcatgtttattcttgaaaaaaagtgagaccataaatgcaaatgaaaattgacccatactgaatatacgttttattatcattattttagcaaaacacatatttttcaaagaatcaaggtcaagtttccatattagattatacttctccatactctgatgttttctatttaaaacgaagacaacaaggtatatcatctgatcatcaacatgacaacatatcacgacaatagacaattatcttcatttgttataatattagttatgtaattattgtattgcataattattagcttcttttgtttccatacacttagacgctgacatttgtgcttatctcatttttttggcgaccttatctttctacgttctatttttgttggggttcaagtttcaacgactaaaaggaatcaattaaaacaaatattttgatatttaactcactctatttcaaaattcgccgactaatcattttcaggtagattcttgtaaatatcattatacacataattgatttgttcaattttaaacgaatataatataaattgtgccggcataaaatataaatattgcggttaaaaaaaaaaaaactttgccatgaaaatatgaagaggtattcgcgtaattgtgtaaatagatttgattaaattcgtcacaaaaaaaaaccgtggcagaaaagtataataagatagggcgattgacacaaatagcactaaaaaactttattattccaaaaatggcatctttttttgaaacttccaaaaatagtatataaaaattttaatcctctataaattaattcaataataaagtttttttattaccatttgtatcaatctcccaaataaaaatgagagcaaacactaatctaatattaaattgaattaaaaacttttaaatagtggaaatatataccctaaattggaaataaaaaacccaaatataatattacaaactaattttaaaataaaaaatctcttttaaatggtgaaaatatataccctaaattggaaataggaaacccaaatataataccataaacttatattaaaatgaatcaatatttcttttaaatagttgaaatatataccctatattggaaatagaaaactcaaatataatatttaaatttatttctaatttattttggttgaatagattttatataaacttgtggtattattattgtccataaaacttgttttagtgttacttttaagaatttttcaaataatcatttgagtgctaattatgtgtaaacaactttttaatgctatttttgtccaaaaaacttaaaaatgtgctatttgtgggaatttttcaataagatataaatttaaaactgagttgattaattaaaagtgtcacacaaaaaaaagtttaatgtgaacaacaacattaattcttttttaaaaaattttgttttatactattattctattaacatgttaattaatataactagaaaaaaaaatcaatctactaaaactaggttttttagcattttataaatatttgtatgagaactttctctaattcagttcatccagttaaccattgttcgcttattctgcaattcatttatttatctgatataccagttaaccttaaatgttgtgtaatcagtcgtaaaattgttttgtgtaatgttacataaattaatagaatcaaatttaaaatgtgttctaattatgctatgacgttataaacaaacgataaattccgattcatgattatgaagtatttcaattgaaaacacaaaaatcgacaaaattttaaaaatattttagatcttacattacatacctgtattgtcgcaaaggaaaatttatttcttgtcctaaaaggccatttggaacttgagctaatgtaaatatataaatgggcttattgggtcctctaatgggcttgcctttgacgtagaagacagaagcatcgttgtgactcccgtttgtgatttaggaatccgcactgcttgccgttttccgtttctactttacttttcaattcagaaacgcctctctcgtcgtcttcaaagctaaattagaaacctgacgatctctctctctctctctctctcgatcggataatatttgagctttgtggttggaggatctgagttagtcatgttcatgatcgattggttctatggcgttctcgcttcgttagggttatggcagaaagaggctaagatcttgtttctgggactcgataatgctggtaaaaccactctgcttcacatgttgaaagacgaggttcgctctcactttcttattcagatctttcttatctaatcgatccaattccctaaccttattcgatctccaattttgtttttatatgattctggattagatgcttaaatttgatttaggaatctgagtttactgcttgaattttgagtccttgagtagtgtgttttaattgcttaactgatcgataatcgaacatggttgaattggtgaaacagagattggtacagcatcagcctacgcagcatccaacttctgaagaactcagcattgggaaaatcaagtttaaggcttttgatttgggtggtcaccagattgctcgcagggtctggaaggattactatgctaaggttggtattaaagatttctcatttgttataccagtttagctcacacgcaatgcatcatatattcacttgttattgagtacttgtcaaagattgagtcatagaggattcagaaactccaaatgtttcaacctacttaagctatttcagtggaagagttttatgaaccgtcggttttgatgattactctgtttttgcaggtggacgctgtggtctacctagttgatgcttacgacaaagagagatttgcagaatcaaaaaaggaacttgatgcacttctctcagacgaatccctagccagcgttccattcctcattctaggaaacaagatagacataccgtatgctgcatcagaggacgagctccgttaccatctcggcctctccaacttcactacaggaaagggtaaagtgaatctaacggattcgaacgttaggccattggaggttttcatgtgcagcattgtcaggaaaatgggttacggagaaggtttcaaatgggtttctcaatacatcaagtaagacaaacacacgctgtgttattattaagccgtaagcttgcttctataaatcctgttttttgtatcgtcttgcttcgttttttcctctctttaattgtgttgtaagaaaatgtcttaaaccgtacctagctttttctcgtttgtctgatcctcgactggtttgttcttgtagtgaattttttacacgtttcgtaatttattcaaataagggaagaaaaaaagattagattatatactttgtgtagttagttaactaacccaatagagaaagagatgtgtggttgagcagttttttcactttgtttcacgcatacttagaaataagacaagttttaagtacgtgtgttagcagcagcaaaagattacccaacaaacccatcaaatttttctccccatgatcccaccaatacaatatacatgttttgtatatgaataatttatcattaaagtcaaaagatggaaccgtttaacgaactcaatacaaaccaaaccatttcatgtgttgtgtgtatgtgtgtgtttatatatatttacaatttacacaaagacacttataggatcactgtgatctgagaatgggtaacgttgctggttcccgaaagttggatgcggccgggatggctgccggaaaagttgtattatccgacggaagggtacaaaacttagaggaagagacaacggtggctgagattatgctagaaaatccgcaacatgtggtcgtcgaatttgatccgtcatcgatatcattcaacaacgacgcaaaaacggtgaagagaaagctggctcctttgcccgcggacaaaacactcgagccagggaaaatctatttagtgcttcccgccaaaagaagcggtggcagggccgcaaaatcatcatcggcggtgctgacgtcagaggagatgcggaaaatgctgtttagcgccacggcaatggtaaggtcatcgtttagctactatgaagggattcttccttggtttactactagaagttataagaacaacaatccggcgactgatacggtcgttgctgctacgtcggttggaagattggaggcagagatggaggaggaagataggccggagtttttgagccggcaattgtcgggaagagggtggaaaccaagcttggatcctatcagagagaagaaagcaaagaagaaaatccatcaacggttcttgttataaatacgttgtcgtttggtttaaatccttttctaaatgatcttgtattttgtgttttgtgctaaattgtgtgtattgtgtaaagatcgtttcttaacgtgcgtatgtgtcttgtacgccggtcacgagaaactcacgtgaattccaaaacctctgtttcattcgtacgttatctcttgatacttgttctaatgtagtaattcaaaacacaattcttatgtaattttctaaaatttccttgtttagatcttttgtacatatatatacatatacatccactagattttcttacttgagttatagcgaaatatttgattttcgcagtctgttatttaaattttttgtacattgtctctgggacctttagtgtcatattttttttcctttgtcattttatcttttttcagaaaagtttttataaaatttgtttatatgggaaataggagatgtttatttctctgaaggttaaataaagagatggtgcacgacttcttcttgttaaaatacattcttattattttctcagacgtgtgtatagatttactttgtgtcttttgcacaaagcaatgtttttgaacagggcaaagtatcagttaaagaaaattccaaagtatatcagtaaaagggtaatccttcattgcatgtttaaagtcgagcaaaagaaaaaaaaacagactgcgaaaactttttataaagtcgagcaaaatacagaaaaaaaattatggtccaaaattaagtaaatacatacaagttatacgtttttccaggactcttttttcttctaatttgatgaaattgtaaaatataacttttatgtttaaaagggaatgggatgaaagaaattttggcaatttagcgaacaataattggaaacttatgttagattcaaaaatataaatcaaccatatgttaacctgatgacctaataacaaattatatgttaaattcagaatcgtatgaaaatgatttcatccagtgttatgatttcttaaataactacaaaaaagaaattcagaatatcctgagaaataaaatggtttgcatgtgacacgtgaactcgtctccatgcacgtgcaaagcacgtcttccattatctcgaatgatttttgtatttgtttagagaaaaagatgatgtcacattgacattggttgatgacctcgacaaacgattggctagtgttgcgaaatctaatgataaataatactaattactttctctttttgtcatttgagaatatatattaatccaccaaagggatcaagagagttacaacgatttagtcacaaagagagatgatacataatcttacactagcaccatctccacatcaaaccatagaagtctatacaaaagaatgagctcatcaacgaagagcaaaagcaccaaatactaacaagtactatcaaactcattcagagcaaaagaatgatctcaactccagaacatcaaacatcaaaaagactactactaattactttctatgttaggtgataacatacttacacctaaataaatccatataacaaaacttcgtttgtgtttgcgccaaaacaatatattaacacttagaggaaagttgataacatacttacacctaagagtggctttatgtccttatttattaaaaaaaacaaactcttagatatatttaaatatgtggtatacatatatattttatatacgacgtatttaaccatagcaaaaaggaaaaaagaaaaacataatttcttgatatctacagaatcgtgctacattttgctgaaaaggaaatagaattatattccaaaaaaaaaaaactaaatataatcatataatgtagatctcaactataagaataaacgcagtaatctaaatatagtaactaaaatatattatcataaactacacatgtggatgtggtggtcaaatttggataagggaatctttagggcttcacaacaagttttgcctcattggacatcaacacgtcttgataattgaagagcttaccattaatctatatatagttaactaatagcttaaatagcaagttaccattacatgagatctcattggaagagttttattatatttcagtattttatattttaatgattaacatagtagaatgattatggtcaaatcaatgcgtagttgtgtacaatatgattagatcgaaattagtggcaactaattgaccactcacgagattgcattcgcatatctttaaactccagtatttatatatttaactaatgcacttctgccataattaaccttttgtgtttgtatgttaattatatttacagatttctacgtacgcaattttcttttaaaatatatcagtttgcaatatctattttgaatttacgtaatacctctgttcttttttttttgacatataacaccagaaatatgtcagctgtttgcaaaatataacaccagaaattaataaagaatttgtattcggatttttttatgttgatattaaatgcacatattataactttttttattttttgtcaaactttgatcataatttaaacctcacttttctagtcctaaaatattaatgtagcatatatatatttcagtttgcttttaattaaagaacgttatttaatgtacaattagtaagctcccaccaaacaacaactactcgcagctgcttctgcagaaatataagaacttaaagggatccaatgaggggaaaaaccgttaatttcattcgatttcattagccattgttattataatgacaggtgttgcacaatataattatagttaatttagtttattgcctactacgaacaaacctacaaatccaacgactgattgaaatgaaattgaagtagcatatacgtaaattatagttatttggtaggagtatttgtttgatatagttaaatacaaacaattgaatttttcaatttatattaaacaattgacaaattgtataagatagagtatttatattaaacaattgaatttttcaaaggtcgaaacttcagattagtatattcgacaaatttccctaaaaacgaataaatatttgattacatcttcagaaagaaaggaagaaagtttgtattaaaaaacacaacatgtgtttgcccacttgatacattaatgacttgctctcttctaactcggcactttgtatcctcaacatttaaaatttgatgtaaatttgttaaataattgtagaaaccaaccattatgtatcatgtcacagttctttatattacttccttaaatttggatcttctacgcctacctatatataccaataactagcagccttagctgtatatccattccgatccataagacatatttattacggtagagttgcatatttataaacaaagtattaaaagactacttaacgacttagctaggagataatcattagtatatggagttctataaacacaagattcacaattatttcttttgtcggcaattcatttcacaaaactacactaaactaatggtttcaattatctttcaaaaaaatgacataataattttcttattatgtatttttcacaaattagacaattatataaaatattcaagattcatcagctagaattttcaaattttatgaaaattgaaaagaaaaacattggaatcaagtttttcttttatctcgtaaaattatctattattgttaccactttattctttacctttgaaaaccacaaagtattaatgacaaattcgttgaacgattatcatatggattatgtaattgtctagcgtgtgcatcaagtcagaactaatttgttacctccgaaaaacactgaaaatcatcggatcacaatataactgaatgaggttaaaagttgaagaaatagaggttgagagctggagaaatgagctgtgaagacatgtttttttttgttgttgttaaaatgattatgaagacatgtttgttgtgtagaaagaaaccaaaccaagactctttgatactcatagaacttgtcatgttatttggcaattatgtcattatttgctggccccttccatatattggagcccaattcaagacttcattatagaacattattcatttattattcctaggataagacatagtatatatttgtcccgtggtgtctataattaacatagtcgttttcctcagagtataagtaaaaaatgttttggtctggaattgttcttttctttattatatatatttgggtaaagaattgtcaatgtgcaagatatttcatacattaatataaaatggggttagagcactaggtcaaaaatgattttcttgaagtgactctatgcttgtattagctttcatttatttttactacaccctagctatcggaattgtacacaaatatcttctttttttataaagaggtatacaaaatgataacaagtcaatattgatagaatcattaggatctaaattaaaatatatgagtaagaagctatgacgcattcgatgacatttgtcttcaacaaatgatggtgaaaacaaaaatattccatctcgaagaccctttctatgaatattgtttcgctttattctctttaatatttaaagaaagcattattgattatgatgaaatattgtacttagattaggcatttatcctagttgatgcaatgattcactaaatttgttgcattttttggccgagtttatattctattcactcgtataggagaatgccacgtcgaatctaatacaaagtcatattcttggcgttaacgcaaccatttcctctttacttatttaattacttttatatcttgcccccaaagtatagggttaacttatttccctttctttttaataaatttttcttcgacaaaaatgagataccattatcatatggggataatatatatacgtttcttactcgtttaaaaaggttcataaccatgttgacaacgagttattactttgtctaggtttaaaatggtagtgttatatgacgaataaaaagggtattgtccatgtatgaaaaagctaacgaaccctcgcccaattttaatttgttccttttccactttcttcagaacaaaaatgaaaaatttattgcgtctaacctcgagcggtataattgttgcgtgcatgagatatcagcagcaactgcaaaaagcaaacccgttagttggagaacatttacttttgtacctttgtaaatgtattgtatttatacaacaatatatatatttatataattatttattttcgttatatacatgacatcatttggtattttaattccgtatttatacacagatagaagtcactatttgttttgttaaattcatttagtaacttaattcatcataagtgaatttttattactagtaatctaataattaatcacttttcatcttgtaaaacgagtcaatctccatccacgattaatattgtcacgttctaaacataatgtttaacttttatttgagagagagagagatagttatttaaaagccatccaaagcaggccatctttttgatctaatcttggactcatatatattacatgtgcattcattaaaagttaaaacatataggtattaaaataacaattaaataaagccgaaagttttagaccctcaattaagcaaacattaaacgaatacaaaaaacctaaactgcttcaataaataaaacaattacaaaaaaaatatttaaattagtacgagtcttgtgacttacggcatacttattgttttgtatatatattcgttcatatatactgtatttttttagtcatcggatattatttaggactcatatgagccaattttgaggaaaattgtttataaaaatgcacgaatttttcgtgccaaatagtccactttaacatttgcattacgagagattaaagataaataaaaaatgagaattcttctttgtcgctctgaaactcctccaaataaattgaaaatgctggccattcggttgggaagacaccttcttcaccaggtctgaacagtccgtaaaaatagctacttgtcggcaccaatcataaaaaatattagttatcatgatttttatgaccatgatttttaaaaatataatagataaaaaataattatattagttatcaaaagggaaaaacaaaaactaatatcaataatgacaatgtgtattttaggaaataatgaatgagggtggaatgatgatagatagggctaatggtaagcaaagcaaagcaatagtgtggttttgtgctgccagcttggaagaggaaaggatccaaagaacttcatcaaagggtaaatccgtcattttagcattcatcttcttcttattacacaactctatctctctctctcttacatatttaagacacttcaattcttcacatgatttttcaaaatctctctcttctctcgtgttttcgacttttcctctctctcttatataaattatatattttgctttggtttttttttttcaccggatcgatcgagaagagagaaaagttcatcttcttcttgttctgattgtttgacaagttttacgacaatggcggtttacggcgagaagaagcattggtggctccgcaacaagaaggtcagtctccatctttggatctcttcttcattgttttcgtgaattcgattcgatctcatcaaattatgttgttttttatctctctctctctcatagatcgttgataaatacatgaaagaagcaaagagtttaatagcgagtcaagatccaaacgacgtgaaatcagctctaaatcttctggaatctgcactctctgtatctcctcgttacgaactcgctctcgaactcaaagccagatcccttctttacctccgtcgatacaaagacgtcgccgatatgcttcaggattacattcctagtcttaaattagccggcggcggcgaagattccggtatcggttcatctgagctttcttttactcattcttctcgtgaatctgtcaaacttctcaacgatttgcctagtcatcatcatcatcatgactcgtcttttaaatgcttctctgtctctgatttgaagaagaaagtcatggctggtctcactaaaaactgcgacgaacaagggcaatggaggtcatttactctacaaaaaaaccatttctgattttcacccgacccggattttttgattcggatctttttcttctttctgttacagatatttggttttgggtcaagcttgttgccatttaggtttaatggaggatgcaatggttcttcttcaaaccggtaaacgcttagccaccgctgcgttccgccgtcagagtatttgttggtctgacgatagcttcattctcttctcctccgaagacggcggctcctctcctccctcctccgtcgtcgtaacttccgcatctcagccacgatccgagagcatcgctcacgtgttatctcacatcaagctactcttaagacggcgcgccgccgcactcgccgctctcgacgcaggactctacacagaatcgattcgccatttctcaaaaatcttagacagtcgccgtggcgcgccgcagggatttctcgcccagtgctttatgcaccgcgcctccgcttacagatccgccggaagaatcgcggaatcaatcgccgactgtaacaaaaccctagcgttagatccgtcgtgtctccaagctttagaaacgagagccgcattgttagaatccgttcggtgcttccccgattcgcttcacgatttggaacatctgaaactcctctacaactccatcttacgtgaccggaaactacccggtccggtttggaaacggcacaatgtccggtacagagaaataccggggaaattatgcgtcttaaccacgaaaatccagcaattgaagcagaaaatcgcaaacggagaaatcggaaacgtggattactatgctctgatgggaatcagacgtgattgctcgagatcagagctggatcgagcttacttgttactcaatttaaagcataaaccggagagatcaatgtcatttattgaccggtttgagttaaccgatgatgaggaagaattagactcggttaaggaccgagcaagaatgtcaactctattactatacagattgatccagaaaggctactcagtcgtcacaagtaacatcgcagccgtggagaagcaacgaaaagccatcgccgccgcagtagcgactgaatctcatcggagtaatatcatcgaaacgccgattagagcggtcgcggttgctgtgaacagtaataacaatacgaatgtggtgaaaggagtgttttgtagagatttgacggtggttgggagtttgattgcgcggaccgggtttaaccaaccgattccggttaaatacgaagcgcttagttgctgaatttgattgaccgtgtgaaggtgtttctctgcgttttgtacaaaagaaaagacagatcatcatcatcactattcgcattggatgaaattatggatattaagaatatattgtctgcccgagaattttggagctttctctcttgtttgtttcttctttattcttcactatgcctaaacgacaaaacccaaaataaaaagtgaaccataatattatgaaatatttacatcactattcacatttgtgaaatatttatatcaaataataagcggtgtaatcattcgaaaattttgtatttctaatagtttctgttagttaaaaagcaagtattgtttctcaagtaaaagttttactgtctataatatggtttcacatgatctttgcagatatgaaataaagaaatgtgtagatgtaatgttgttttccttatgaaaatatccttaaagttaatctttttggttacaagtggaatactttatgaaggaatgcaaattataaaatactgttgagaagtgagactggtgaggaaattgtagagatcacaacatgtttgattgattgtctcctctttttgctcctatgaattgttttaaaaatcattttgataactaagaaattctgtattgaggtctatacatctttttaagattggatcaatatagaataattatatgtagcaacagcattcactcgatcatgtgaatttgtagatgactacaaaatacattttcagtcgaggtatcaacttctattagagaaaagtcaattgagaaaagaactacttacaatttgatcatttgttatataagctatcaatcactcaacaaactaattataaaatcgactataataaaattattattaaattatattgattttccttagcagaaaatactaatctttcaattagtctaaaaatttgttttaacatttatgttattgccaaatgaacgccatgacaaacaaacgggtctccttacaaacatacatagctaaattacaaaaatattaaatttggttaataatttttttttgtgtcaattaaaattttgttttaaaaatttgtaagtaaaaccatttgctataacaagaatttatagcttgattctggtgggttgtgttatcatcatactatttcacgtactatttcatcttgtcgactggaaaataatcgttagccgggatctacatgattcaagatattaagaaatagccaattgaaaacgcagtcatctcaagacccactaatttttgatggttaggagaaaagtttaaagatgtttttttgttgtaaattaatgattgtgtaactaataaattttcagacaacaggttacatcagaaattaaattatgagaaggaaaggttaaaaaattctaaggaaagaattgacagaagtccaatcaaatgcacataaaacgaagaaactagcaaaggacaaaagtttcttcactttggacatgacatatcgaaaggtacgtgaatgtataatatatagtttattacgataataataatactgctgcccataacgttgattcactttctcattggttagtgtttttgtcttctcttcttcactttgataacgcggttaaacctttattttgtgtaatgtctttgcatgccacaaatcagacagcacattggtaaatgagggtttgtcgattttaccaaggtaaaaagtatagaaagaacagtaggctaggcatgttcaatcagtttagcttaaatcaggtgggactaaaatgaaagcaaaattctaaatcgagttcgttcggttatgcagctgtcgacctttcaccaacaataaattcatcatgcaaatcatcaaaaaccacgatcggcttcgagaatgaagaagaaagcgatcaaaaatgtatttggagatcaaaaacatcacctaatagatcgaaagggctcgacggtggagccaataaagccagccgttgagaagacaaagggatttagaagtatatagttcatacacaaatcatgcctaccgcacttacgttgggttaggttagcatcaaagctcttactgtttaattatatacatgatcaaatattacttcaagaaaatcgatggataattttgaatttaaaatagtttgatgattattcagattgaaaattgtctcgtgcgtatgtcacttggtcgcttgtgttattggtagttccaaccaaatatttatgtatagcacaatcgatgtcttaagttttctatatgttttcgaagctcatcaaccatgaccccgtcaagcgactagtctattatactattgtagaggattattcgtcgataaaagttaagaaaaacctagcctctttatgatgaaaagaaatcgaaaagctcaatcatgtgactgcgttttgcgctacgggagtatatatagagattttgatattgttatatcactgttgcggtgcggttttagatgcagtatatatcaccattcatggctttagtttctcgatatttgtattttaagttatatttactaacgaaaaagaaaacaattaatttaagaatatgagtcaaacgtgcaattgagattttctaattcattcacaaattcatcatatcatttactatattttagatttttcttaacagaaattttataacaaaaccatattaaatgtaacgtaaataattgagtcattttgaaacgtaacgtattattatattctcgaagtcattttgtgagaagactatacgctatgacgctcgctcatggtcaaagttgggttttgcttccgatattgggtcgaaccgaatataaccaaaccaattacaatcttagtatggctcaatttgagtaaaaccaaaccagttttgtttttctacaaatggtggtggaatattgtgatggtgccacgtggatttggttagcccgccataccgcttcatcttaaaaaattagaaaatcaaaagttttcattttttcaatttcccccgcttccttcaaatcttccccgagacgctctctaaatcccaattttattaatttgttcgtcttcttcttcttctgattcaaagtcaattacagttaaaatctgggtttttcttttgatttcaaatccaagtatcgatcttcgattcctccaccctaataaaaccctaatttttcaaaaaaaaaaatgcaatcggattcgggtttgcctcccaagacgtattcgggtgtcaaattcgctctcgttggattcaatcccatccatggaaactcggtatgtcatctctctctcgctctctattttcaatcgtagattcagatttccgtaacggtttctgattttgcaataacagttacggtcgaagctagtgagtggtggtggtgttgatgttggccaattcactcagtcatgtactcacctcatcgtagataagcttctctatgtacgtctctctctcttattatctgatttcgtctctcgttgaaaaaatcttactttttgttttcttcaacaaacataggatgatccgatttgcgttgctgctcgaaacagcgggaaggtagttgtcaccgggtcatgggttgatcacagcttcgacattggaatgcttgacaatgcaaattcggttagtcataaccaatattttaaaatggttttatatgtaatgttttgttgattgcttaattttggtattcacagatattgtataggcctcttagagatttgaatgggattccagggtccaaagccttagttgtgtgcttgactggctaccaaggtcatgatagagaagatattatggttggtgtgttttttgttttttgtcttcttcttgttgttgttgtgtttgggagttaaacttgtttcttccgttttatacagagaatggttgagttgatgggtgggcagttctccaagccgttggttgctaacagagtgacccatcttatatgctacaagtttgagggtgtggtgtctctactttggttcaactttcctttagcttagtgtttttcggggagtttacattctgtcgagtctttctttctgcgcaggagaaaagtatgagctagccaagcggattaagaggattaaacttgtgaaccaccgttggttagaggactggtaagaggcatacaagagtttttttgttttttttcgttttcgttttgtggatgtgaatatcttttctttctttctttctttgcagcttaaagaattggaagctcctacctgaggttgattacgagataaggtaaaagtgcaactccatctcttgtattagtggacgcctggaattgctattctttagaattggtatagtctcttattgagagatgaatttatgtcttgctaaagaaattggtttctagatttcgtgctcatttcagcctgattaataatgttactgttcggcatattacactttcactacaagctagtcattttctcttttctcagtggctatgagttggacataatggaggcttcagctagggattctgaggacgaagcagaagatgcctctgtcaagcctgcaaataccagtcctcttggtcttagggttggtgccgtgcctgcagttgaaatctctaagccgggaggaaaagatttccctcttgaggaagggtcatcattatgtaatacgtccaaagataattggttaactcctaaaaggacggacagaccttttgaagcaatggtctctactgatctaggtgttgctcagcagcataattacgtgtcccccattagggttgcaaacaagactcctgagcaagggatgagcaaaatggagactgatggctcgacgtctattaacaggagtatcagaaggcattcttctctagccacttattcaaggaaaacacttcagagatcgccagagactgatactttgggaaaagagtcaagtggccaaaaccgttccttgagaatggatgacaagggcctaaaagcttcgtctgcctttaatacctctgcatcaaaatctggttcttccatggaaagaacgtcactctttcgagatcttggcaagattgatatgttgcatggcgaggagttccctccgatgatgcctcaggcaaaatttacagatggatctgtcagtaggaaagattcactgagagtacaccacaacagtgaggcaagtattccaccaccgtctagtttgttattgcaggaactaagaccaagttcgcctaacgacaaccttaggcctgtgatgagcattagtgacccaactgaaagtgaggaagctggccataaatcacccacgagtgagttaaacactaaactgttgagctctaatgtggtacccatggtcgatgctctttcaactgcggagaatatcatttcaaattgtgcgtgggatgaaataccggagaaatcattgactgagagaatgacagaaaatgtcttattgcaggaacaaagatcaggctcacctaagcaaaaccttagtgttgtgccaaacctcagggaagctgcacatgagttggatctgagtgattcagcagctaggttgttcaattcaggtgttgttcccatggaagctgatatcagaactccagaaaattctactatgaagggtgcattggatgaagtacctgaaagatctgtaactgaccctgtgatgaggagatctagcacctctcctggatcgggtttaatcagaatgaaagacaagcaagaaacagagctgaccacgaagaaaacagctccaaaaaagagcctaggcaccagaggcaggaagaagaaccccattaaccaaaagggatcaatatacttgagcgaaccttccccaacggacgagcgcaatgtttgtctaaacaaaggaaaagtttcagcgccagtaacaggtaatagcaatcaaaaagagatatcaagccctgtcctaaatactgaggttgtacaagacatggcaaaacatattgacacagagactgaagccctccagggaattgactctgtagataataaatctttagccccagaagagaaagaccatcttgtgttggatctgatggtgaaccaagataagctgcaggctaagaccccagaggcagctgatgcagaggtggaaattacggtgctagaacgggagcttaatgatgttccaactgaagatccaagtgatggtgcattacaatccgaggttgataagaatacaagtaaacgcaaaagggaggctggtgtaggtaaaaatagccttcaaagagggaagaaaggaagttcttttacagccaaagtaggaaaatccagagtcaagaagaccaaaatatctagaaaagaaaatgatatcaaagcaaatggtactctgatgaaagatggaggggataactctgcggatgggaaggagaacttagcattggaacatgaaaatgggaaggtcagttctggtggagaccaaagccttgttgcgggggaaacattaacaagaaaggaagctgccactaaagatccaagctatgctgcagcgcaattagaggttgatacaaagaaaggtaaacgcagaaagcaggccactgtagaagaaaataggcttcaaacacctagtgtcaaaaaggcgaaagtttctaaaaaagaagatggcgccaaagcaaacaatactgtgaagaaagatatatggattcactctgcagaagtgaaggagaatgtagcagtagatgaaaattgtggagatgtcagttctgatggagctcaaagcctggttgtggagaaatctttagctaaaaaggaggctgcagctaaggatccaagtaatgctgcaatgcaattagagtttgatgataataaatgtaaacacggaaaggagggtattgtagaaagaagtagccttcaaagtggaaagaaaggaagttcttctagagttgaagtagggaaatcaagtgtcaagaagactaaaaaatctgaaaaaggaagtggcaccgaagcaaccgacactgtgatgaaagatgtaggggataattctgcaaaagagaaggagaacattgcagtggataatgaatctagaaaggtgggatctggtggagaccaaagcccggtagcaagaaagaaagttgcaaagtcagctaaaacaggtacaaaggcggagaaagagtctaagcagctcagggttaatcctttggctagtagaaaagtcttccaggaccaagaacatgagccgaaattttttattgtcagtggtcctaggtcccagagaaacgaataccagcagatcattaggcgtttaaaaggaaaatgttgccgggattctcatcagtggtcttatcaagcaacacatttcattgctcctgaaatccgtaggaccgaaaagtttttcgctgctgctgcatctggaaggtacaataacttacttcaatcaacatcctctgtattgtgtagaacaccaaactaagccctgattttcaaacaatttgctagtggtgagcttctgctttgatgaaaactgttatcttttcatctctgactcatcagtttccgtaatgcagttggattctgaagactgactatgtggctgattcaaaggaagctgggaaactattacaagaggagccttatgaatggcacagttctggtcttagtgctgatggtgcgataaacctcgagtccccaaagaaatggcggctcgtcagggagaaaacaggacacggtgctttatatggactgcgcattgttgtatacggtgactgcaccatcccttgtttggtaagaaatatatttctcacatctctgccaattttcttagttcttgatttcattggcagagtgaattcgtctcagtacaataaacactagaatgattcttcacgtgtcgcacatccttgtcattttttcttggtttttgatgtctatatttattcttttctccctactcaggatacactaaagcgagctgtgaaagctggggatggtacgatacttgcaacggcgcctccttacacgcgtttcttgaatcaaaacacggatttcgcgttgataagccccgggatgccgcgggatgacgtctggatccaagagtttatacgccacgaaatcccgtgtgtcctctccgattacctggtggagtacgtttgtaaacccggatacgcacttgacaagcatgtgctctacaacacgaactcatgggcagaaaagtcgtttaacaagatgcagcttagagcagatttgtgtgtgtaccattaacttaaagtagatgaataaatttccaaaattttcatataaaccagtttatgcaaataaaaaacaagaagaagtgacttattgtggaaactctctacaaaaaatctttggcctttgggagataaatataataaccaaagagtatttcattaattattatgatttcgaaaccgaagtaaaacaagcatcacattgtcttaatttatttgtgctatttgtgagaatttctcttaaaagttttggtaagatttgagtagaatttaaaactacgtatataatcgttttcgaatcaagtaattgtaaatatagttatttaggattgattatcaaaatttactaattagaaaataatcattcattaattgctttgagttttaagggtgtgtttatgcaatatttttaaatactaattaataacatcgagattttagtaaagatttaatgtaatatttgaattttggaagaatgattggttgattgtcctaatatcttatttgattaaattgtatgtttgataaaggaattgggaattaagacacgtgggagcttactagtggtagaatataattgatcctcggaaggaagtcagccctttcctttcccgatgaaagccagagttttggtgtcccttggtagtttccaatcagacattaacacaaacagttggtttggtaattggaagagatgaagtacgtattggtgactggaggagtggtgagtgggcttggcaaaggcgttacggcgagtagtatcggcgtggtgcttaaagcttgtggccttggagttacctccattaaaattggtttggaatttctcatttccatttcacgtttgagcctttttttttgtgttgatgttccaaattttttgttatgcagatccatatctgaacactgatgctggtacaatgtccccttttgagcatggagaggtttttgtactcgatgatggtggagaggttttcttgttttcatttgctttctttgcattgctcattgatagatgcttgttgctaaagaattatgctgttttgtgaaggttgatcttgatttgggaaactacgaaagatttctcgatgtgacactaaccaaagacaacaacataaccactgggaagatatatcaggtacttactgagatttgttaacgttcgccggctatgtatgtatgtagtgactagtgagatagagtaactcgttttccacttttaccagtctgttcttgacaaggaacggaaaggcgactaccttgggaagactgttcaggttgttccacacattactgatgcaatcaaggattggattgagtcagtctctctgattcctgtggatggaaaggaaggccaagctgatgtttgtgttattgagttgggagggactgttggtaagagcagcttttgacccattttctgctttctcgtttccacttcattaccctttttttctgctaaatcataggtgacatcgagtcaatgccttttatcgaggccttgagacaattgtcattctctgttggtaatgaatcctcctcctcctcctcctcctcctcctcctcctcctctgctttctttcagtaattatgatgtatgttgcttcatatttcccttcctaggaccggataatttctgcctgattcacgtgagcttgattcccgttcttggtgttgttggggagcaggtacacactattttcttaccctttcaaaatgtatggtaaactttaatatcctcggctttatgcagaaaacaaagccaacccaacacactgtccgagaactaagagctttgggattgactcctcactttttggcatgtcgctctgctcaggtatcgcgagatcacttgtaattttcatacctttgacaagtcttagtttttttctttctttctctgcagccactgctggaaagtaccaaggctaaattgtctcagttctgtcatgtggcggtataacttttatgtgaagcctacgttatatatttactcaacgattatatcacttgatgacttgttacaggcagctaatattctcaatatccatgatgttccaaacatttggcatgttcctctcctactccgtgtaagttggatgcttttttttggctcttccaagataaaggaaatagaatcatgtatgctcttggcttgctgcagaatcaaaacgctcatcactcgattctcaaacaactgaatctaactaagttagtctcatttcttatatggtcttcataagttagccgatatcactttcagtgtaacaccaagttcaataaactcatctctttcagcgttgcgacagcacctgatctggatagctggaataagatggctgaaacttttgataacttgacaaatcatgtgagtatttacactgacacattttcttttacaagccttgacttttcttatttctgttatgcacaggtccaaattgctatggttggaaagtacattggtctaacggattcttatctctcggttgtgaaggtaaacttggaaagtgaatttatagactttggtcttctaccaatcgcatttggtttccatcacaggcccttcttcatgcctgcattgcatgttcattgaagccacatatcgaatggatcgcagcttcagatcttgaagacgaaagtgagaaatcggtatatgttaataataataactagaatctttctgatccagagttaatatcattgttttccttttaaacatcagtttctcctttgcagactccggaggcgcatgctgctgcttggaagatcttgaaggtgagaatttcagtcttagaattctctgatttgatttagttcataaactctccacttgcagagcgcagaatgcattctggttcctggtggttttggagatcgtggtgtgagtggaatggttttagcagccaaatacgctagagagaacaaaattccttatcttgggatctgcttggggatgcaaattgcagtaattgagtttgcaagatctgtaagaaatgtcttggaataacttcaacttgctctgtactttggtaacgttcttcttcttcttattctatgacattggttacaggttttgggtttggaaagagcaaatagcactgagttcgatgctcagacatctgaccctgttgttatatttatgccagaagtatgtattccaaacatgtatgtattcagaaacctatcaatggagtccgttcattctctcactcttggtgatatattaacacagggctcaagaacacatatgggaagcacaatgagacttggatcccgaagaacacatttacacaaccgagactctctcacttcaaaactgtaagtttaaaaattgcattgagaatccttcagttcacggttttaaagacagcaagttgttttttctccgggcatttaccagatacggccaagtttcttatgtagacgaaaggcataggcaccgttacgaggtaacctaagctggtctaagtgaatgtatctatctgtagcaatgatgtgaataaggttgtttttgtttgatgatgttaggtgaatccagaagtagctcaagcacttgaagaagctggtttaagatttgtgggtaaagatgatacagggaaacgtgttgaggtaatagaatatgagataagaaaaaacaccatctctcactctctctcaattcaaaatcctttcttgtttgtttcaacaggtgattgagtttcaagatcatccattctatgttggagttcagtttcatccagaatttaagtcaagacccactagaccttctcctctgtttttaggcaagtcttgagaaacacacttttgtctcatattcctgaagacgggacattattattttaaaagctcattagattgtgatgttacagggtttatattggctgcgaggaagcttcttcaagcccatttaagcaattgagtcgatgaagctcgacctctttcttcttcatcgtcgttttacattttgtatatattataagaaatgaataaagctgacatttataataagagccttaaattgaaggcaagactcacttattcactcactgacaagtgagaatagatgaacaaaaagaaagataataagaatatattcatttcatctcatttggataatagagattagagaggagacaatttcattagccattgagtcattattattaaacgaaattaatctctctttttgggtaattctaattattatttttcaaagagaataagtatctgcacaaaataagaaagaatgttttttaaacacaaattaatgataaaaaaaaaaacagaatctcatccacatgaataacctaactctgattgattttttttgtcccccaacaaaacaaaaaaaaatatgatccaacccgccggtttgaaaataaaattcccacatctcagttgtgtctccggtttggctaaaccaaacccattttatcggcaaagggttttcatcttctactacaaaagctacctttgattttctttcagactgggccggtcaagaccaatgaaaccttcctctactctctcctcatatagcaccaccattcgctgctttcaaaaataatattagacatggacaaataaaccaaaccgaatgtaccgaatcaatgcaaaagactgaaacgaactgaatcaaaaatttgaaaataatcgaacggatattaaattctctaaccgaaagaaccgaaaccgaatggatataacttaaaatattttggataataaaaaaatccaaaatgttatttttagattaaataattaaaaatacttaaaaatatatttaaaatagtaaaagtactaaaaataactgaaaatatttgaaaatgtcaaaaataactgagctatctgaaaatattcaaaacaaaataaccgaatggatattgaattttaaatccaaaagaacagggaccgaaccgaaacttcaaaataaccgaatggatactaaattttagaaccgaaaaaaccgataaccgaatggatacgaacctaaaccaaatggataaccgaatccctaagcttaatttgcatttccgtttttttgtcatagtaaattttaaaaataataaaattacatacgttttcccggcttagttttatgttttatatgacgctacaaataaaatttcttaaaaaaaaatgtaactatctaatggaatcagatactttagaaaaaccaaaaaagaaatcagacccacatgtgattagaacataacccagctggctcaagccaatcaatagttggattgcaagagccattgtcacctctacaatggggtccgaaaaaaaagaatcggtcccctttgctttcagacatattttataaagaacaaaagagaacgtgggacacatattttagataccaaacacaagaaccaaaagagtaaccaattcttgcaactctaattagctgtgttaatagtgatgatgaagagagtctcttttcgctaatgatactactagtactaagtactaactaacaacacacaagaatctagtgctacaagtactgatgaacaaactaaaacataataagtagctattaagttaaaagtaaagtttgagaattttctatacctgaaacgtcaatgcgaatgtcgatacaagtcgtaaggcgtccataatgcgtctaagggacaaggccgtttggaatcgagtcttatccagggcttgccactaccagaccaatgcagcaaactcacaggaccaggatgcaaatcacgacagctacctctaacattgtcaccaccaagtccatgctggttccaccggtgagagatgggagccacgtgaccggagaaaactagaagaaacggtggaagcgagcctagttcgtaaatcctctctcttctctgaatctccatccatttctcgatacgtttcgtgtaaccacctcttctccatttcttaagatctatcaccatcacacctgtgttgaagtaacatggcttcctccctctaaaggtaccggagaatctctcctccgaccagaatcctccggtgaagtatttcgtgaaattcgcgtgacaatactccggagctccgattatcctcgagcctaggctagttttccaaagcttagcgatgtcatcgacgacgacaagatccgaatccaagtatatgacacggttaacacaaggctccagcagatccgctaagtagcttctagcgtagttcagaggctgctcgagagcttgtctcacggaagaagaaatcaaaccacgaactgtctcaggggcaaaatcgtaaatattgaatttcagtctcgggaaaaccgatctcaccagcgactccaacaggtttgtttcctcggagacggcgatgaagtggaagaagacgctctctggacacaccgagtgctgaaggatcgagttaacggctgcgattgagccacgcaggtactctacgtctaacgtgatcgccacgtggaccaacgacggattgcagacgccgccggaggagagacattcgtcgccgttgttgaacaccgctggagcttttctgaagatcggtgatggagaagaacggattgccgccgccggaggaaatgactgaagcgacggagataacacgatcactgccatcgcggcggagaataatccagcaaatctcgttatccaaagcatttcgaaaaaagaaccaacgaaaccctagaaataaccagaagagattttttcttggagagatagagaagaagaggaagagtccattagacaccgaaactagtcggagaagcgcaccataagaaatcgtaagaggcgcaggataagaaatgagagtgccacacaagtgcactctaaaacttaccttactcttcttctctgctcggacggagctcggagaagaagaagaagaagaagaatttttacgaaaaaaaaagaagaagaagaagaagacgaggaaagagagaaagagagagtgtttatttatttttatttgtaattactcgttttgtttattgattatttttatggtcaacttggaatatatttttaatatagtaagaaaacaaattaaattttgtgtaagtgtaacgattacggagaaataaagacaagctgtcattgtctgtcttctatattaattttgatgctattataacaacaacacaatctgattattttggaaacgccacgatttacttctagggaatataccaataatttgatttctttccatattatatataaagtatagtaagaaatattaattggattagtagggaaaaaaacatttgaagatgtaaatagaatcgcagttacaatttacaaaatggtagttaggtttttgatttggagataacacatgtttatgttttggttttgcatgctaatatcaagacaaaacaaaaaaacaaaaatgtactagaaaccaagatctgtcgagtaaatttttagtacataaaatatttagtgttattaatttagttgagatttgagtatttttagtgttttttaggcgattctatattaatgcattctctataaatgcaatattaaattatttaactcactataaatgaaactatagaaagtaatcttacacaaagaaaataagaataaaagcatggaaatatttaaaaatctaaataaactaaaaaagaaaacagatacattccaaattgtcatatctattacataattttatcaaattgcaatttatatcccataacttatttgacaaaacaaaatcacttcaaaaaaatatgtcatattttcattgggaccggacccctttgtcatctacgttaatacgtcgtcgtttagcctgacacaatcgacacgaccaatgcgaatcttaaatttttccttcgctatgaaaaaaatctaacacgtacgttaacgtacattcatttaatcatttaagtagagaagctattttatttatttacttttttatatctttacaaaaccaccatcattaatccaccacgtgtccattccaaatgaaataatagaaaatcaaattatccaattatctattgttatgaaatgaatttttttttaaagtcaataatatataggtcctaaaaaaaaataacctacggttttgattttaatattattataataatatttttaatacattaattgtgaaatgtgttgttgttggtgtaaaagcacatggtaacagtccgtacggtctacgcctcagaacctaataggcccatttacaattcagaccaggctggcttccacgaccatcactccggtcgtgactcggattctcactctgtctctgcctcgtaggtcccaaaccggacccgtacccgactcatttctgttgattcttttactttgtgggaacaaaaacagtttcaagagattgagacttaacttcttcttttcttggctcagtaatatagcttcttttttgtcctttttttttatagatatatctcaacatagattcattctctactaaaatgtgacaatattatattgaattattgacacatcaaattgaattatactcttacagttttcttaccacttagttttgagtaaagttgcaaaaatgtatgtgatcttgagtaaagaccattagttctgcaaagaaaacaacaagagcaagtatgttttccgcgtagccaaccgttattatctttgtaactgtcgcatttaaaagattttgctccaaacgccgtctttaagcagtgattttgatcatgtttgaaacaatttgataccagaagatttaagcatgctctttatattttgctctttctatttaagactttggagtggagtatttgatgttgcatatggttgtcaactttccaatataactatctgattcatgtgtcgtacgtaacaccagggtccagggatgattttccattaattacaatactctctcatgtcagaagacgaggacccaacaacaacaacaagcactagctcatcgtgacttgagagccgccctgtttcaccaaactgataccaaagacctcttacttcaactaactcacaacacccgtcgtcgtcctcaacaatctcacgccatccacataaatgtcctacctccatgagcaccaacgcaacaactaccactccacagtctcaccaaagtggatacacaaggttcccacatacgctttacccaagtctgttcagggtgaaaacacaaagaggatgtgcgttaagtatatggaagaattagtttttcaaaggcggacgaagagagtgcacaaaagtcttgtgattttcttaaaatgtttttttttggttctatgttgcacccaaaaaagctctctttctatactattctaagatctcatcaatatcaactttggaatgtgattctctttaaaatttacagcttgtaaggatgaatacaacatatataaggaatcttggtgaagaacaaaatcaaaacccttttggaccatgtgaaaactgtcttatcgtcaattcatcatttatgctcgaatcaaatctttagtgcataatctcataaactcaaaagtacgaagacacaacacatttcaaatatagagtaaagtagtttctttaatccgaagaagttaaagtagagagtgtatttaattaaattttattctcaaagctaatcaaaagtaagcatttctgaatgatctagaaggccataacggctaaggcgtttgctgctattaatttcgtttctgttggaaattgagatctgcaggtagaccaacgggagtagattcaagcttgtgtgaagtatctctgggattttttggcggagaaagcggttcctttacaaaaccgggtggtcgaatatccggtacatcctcatccgctggagtcttcgggttcgctacatcatccaaaccctacatcaacaataacaacatatcacaaacaatttagttgtgacttgtgacagctaagcttgacatatataaacaacaaagtcaaaatatacctcggggtctgatggaaaaagactaggctcgtctccatcgttacgggcatgaatctctggatcagcggttcgaccagtagaagaagatagtctcttcgcatgaagacgacgaccgagagtagaacgtgctgcagcaaaagctggtgaagacagcattatatctggctatgttgttgttcttgttgtctgttggatataaaacaatgagagtgttttaaatacacgaattagtcacatagcctaaaccctaatttctcgcatatagaaattatgaccatgataataaccacttaatcaccactaatctctcctatttgtaattagacaccaaagtacccaataaaaactccacatgcgtatattgctcttgaagttttgaccgttgcctcaaacctccacaagcgtatattactatttctagcttctctgttttctaaaattgcgagtaaaaatgattaactattgaataaaaatgtttctggtttagttaaggcataactacgattttgtaatggcactaatatatgaaaaaagggaactttgttgaaagacgagatgatggctaacacagaataattgtttctcttccccaaatgatttagttattgagacaaacttccaaaaagaaaagaaaatcgtactatgtttcttcatagttcatgtccacgagttaaggagtgggcatgaagagatagagaagattgatatttcatctttgtgatgttaccactttcgttcgatatgtggcttacttaaaagtccaagcaacttctatgacccaattcaactattttacctttcaaataaagttgaattgaccaggaggaacattggtgcttccgaactggaaaccagattgtggagcatgattctcgtcgttgccttcttcttcattgtcttcagtccaaaatgtttcgaggatcttcacggctttgtcgtagatatcattgttgtcgtgactctgaagattctcaatcttctctaacccttctgcttcgtcaatcatttgagcgtagaggttgtcttctcctgtgtgacctaagttcttctctgcttctccaaccacgagaatgttctctagtgcttctaagcaaaccgttacaactttcagatctgggcaagtaaggagatcgcatagaggtttgatacagccttggctcaccataaacctgagaagaaacaaacaataaacacagacgtgttttagaaatgaccattctttgttaaggaaacatttcgtttcggtttttatggttttacttgatttgatcatgagtgccaccagaagtagcatttgatattccccaagcagcttctttttttacttcgaactctgcactttgaagcacccaaacaagagactggattatacctgcatcaatcactgcctgcacatacgggttcgaataaaatcagacacaggaaacttcaattttcgactttcttgttaaatgccatatattataaacaaaactcacttgtatctgatctgcatttccagctgtaatgttggagatagtccagcaagcttccttcttgatactcttcttgtaattgttttttagaaggttcaaaagacaaggaagcgcttgctggtcgagaaccatctgtgttaggaaaataagttagagacatttgcttctgaaaactcgaaatcgaatggtgaatgtattatatgcacctgagtctgtagatcatccccggttacaatatttccaatggtacgaagagcaggaatcagcactgatggcgacgaatgactatacggagaaagaggaagcacataaatcagataacataatcatgcctggcaataaaaattaaaatgatcactatcagatgcttaccctaagagctggatgaggcgaggaacaactcctgcttcaatgactgcttgtattttgtcgtttgaattatccgagaggtatgacagagcccagcatgcatctgtgagaacttcttcatccattgattgcacaaggcgctcaagaactggtaaagctggttgtgtctgctcgaaaaatgttttaagtaacaaaatatcagaagcatgttaaaaaatattgtggagattcaataaagtgtgtatatttaaggaaacctgttcaaatgcgggtgggggcttccctctgcagaagtttgataatgtccatgtagcatttctcagcattgaaagctttgtattctcattgaattgagacagaagaggtgtcatggcaccgtaacttaggactaaatcccggcattttggtgagtctccagcaacatttcccaatgcccaaacagcctatactcagtcagggaaagaccagaactcagaatggtaacagtctcaatgaatttccacttgatcctaatgtctaagtgtttcttctgtgacaataacgataacagtgaggatttaaacatatacctgttcgcggacatcttcactagcagagctgagaagttggatgaatatcgggacagctccactttcaatgatgacatttgtgttctctgatgtccctgaagcaatgttggtgagcgcccaagctgcctcaaactaaaacacattgcagaagtaaacagcaaaagcaagttaacaaatacatcaaactagtaactatcaatatatccaaaaaaaaacgactgcagctgcgactcacctgaagtttggggaagtcatccctggaaagaaacttcacaacacgaggaacaacaccagattgtacaacttcattgataggaggattttgttctacaaaagaaaaaacaactgctaaagactctaaccaaaacactgattgttatgtactactagtaacgatcaataacataaatcacaaaccaatagaaagcagtttccgcaagagatttgttgcctccaattgtgaattgctatcctctgaccagattccagcaaccatagcaggtagattatcttttaactgtaacacgaagagacactatcatagtcaaaaatctcctctagctaaagtaaatttgatgatctccgttgagatatcaaccctaattctctttacatgtcaaattcaacaccgctcaaattcccagtcaattaaacagacattagtaacaaatactctcaccaaacaacacatacacatcgcaagtttttgcaatcaaatacaaaatctatgaccaaaaacaaagaaacatcgcaagaacttcaaatctagaacaaatcgatctccaattagaaattcatatgaaacagagacgatctaattgatcaaatcggaacataaaatcagaaaaaactaaaggtggaatcgtaaacaaaagaaagaatcacatacttggttcgctgaagaaagatcctgttccgtttgtcccgttgctgagccaaaagccatagaagacgtaaatctcttcttctgcaaattttcctctctcttgttcttcctgatctcaaccaagttatcctctcgcctccgccgtccttcctccgcatcgaccgctactttgtaccgattccgtcgcacctccgtcttcgcgctaggtctgagagacatcgccgctaaaatcgaatcgaaatcggaagagaattaacgatcggaagattatttaaacacgccaagttcgattaatgagagagtgataagggttttggagtttgatgcgagtgtatttatacaagagcgtgtacttaggaggccacgattcaggagacttgttgttaatccaatattgcccctaagttttatcattaataacgaacctgccactcatattttttttcttttttgaaatttgaatcttaacgtctctctgcctttttaggtatgtatacaccgactactaattatggatttgttttcctttattttctccacgcaaatattcttttctttttctgcagcagcaatactctaatttgaagaggctttttaaagcccaaataaattattacataggccaaacttggctaaaacaacgtaatttacaagactgtactctaattaaaaggggtaaaaagatcaatgtgagcaactgagcattatgagaactttactaattagatgctttactattcaatgcatcttggaaagacgagaacaaccatattgcttgaattcctttcaaatgagagaacaactaaattgatttctttctatttgtgccatcttataaacttgagtgaacgacctctattcccctacgcagtttcacatagtaccacaactacacagatttagaacttcgtttacagtcaacacaaaatagaaggtaaattattatatcctcctaaatcgaaagttagagaatttagtctccacaaaaccaaattttgtagtttattattaggttaacgtcataaacctaatgccaaaccaaaaatctagtataataaaccgaattgcaaccgattcaatttactctccacatcataaacttctaatctctcttctttagcttccatgtctctgattttctcttcaagcaaattggattctcaaaccaataggaaaattctaaattatattggattgtacccataagtgaattataaacttctacttaactcattattgggtttttggttcaaaagaaaaaaaagaaaaaaacgaattgcttgaaatatgacaacaacaaaggcttgtagctcagagtcatgtatatgacaccctaggaaaactgccaaagaagctcagagtcatgtatataatttgcgtacaaattcatcatctactatatcactcacaagaagctagctgcaatttggttctagcattatgacttgaagatgatatatagtaaaccaaaatgacatcagttttataaatatattttaatatagtttgcgtacaaattcatcgtctactataaaagtatacaatcaagactaactgaatacaatatatatatcattacttaaatcatcgaaataatagacgaaaaaaaaaaatcatcgaaataatcaaagacaaactctgtgcacgtctccatgcatatatgtatactcatgtaatatgacattatgcttcagtgaatagaattacaatgtgcgatttagaccatcatcatctctttagctttgtaacgttctgtataagcctgattttgcatcctcatctgttcataaaatctcacaataaactcctcagctttcgcatcaatcatctcatcacctccatcatcattaccataattttcatcatcatcatcatcttcatcaagacaatccatatctcgcaacgactttgctgatccatatcccgagattcccgaagagcaagaactagacgtcgccgtgagaacctcaaccatctccgatacctgatcgtcactactcgccggaacttcatccgtcaccggagaagatgatggtggtagtatcgtaatattagacgacgatggaagtaccgtaacattgtcgtttttcaactgcccaaaggactcgacaactcgccgccaaaacccgttattaagcggcttgctcctcctccgacgccgaagcatgtataaaacgacaccgatcacgtgaaaaccacgtgatcgtttcttcttcttcatattcttgatctcttcttggccaccattaatctgattttgaatttccatatataagaattaatggtgatcaaaaggatattcaagatggggagacttttccctgcgatgagcagggaagaaagattttgaaagaagatcccaaggtttcttgcatacaaaccaagtctatttatacttatgaaaataaatacatgcaaccactatttttaaagtattgggtgaaaactataagatatgaagagttttgggtttaatggtggaagtaaaagctgtctcttaagagagatttcacgtcataactagaaaagacagcgtgctcttcctgtgttaatcgttagttacgggaacaagaagttaaagaacagctaattattttggtaattgcttccttctttattttatttttgggttcaaaagttggtgcttcctttatttaccttttaaatgtggatatagttcggaagcgtataacaaacctttgcttatttgcatcaagcttccgaggctcattcacgacttacacgaactatcacttaaaaaataaatatagtctgcatcgcttaatttgaatattaacatcagttatagttgatgtacataaattttacattacttatataaatgaatttagaattggtgatgcaaatattttgcctcacttgaactaaatatttatattgcttattatagttaatagaataaaagttttagtttcatgagctcaggatagaaataaaagaaaaagagattttccctgtttatggatcacttgaataatgcttgtttttttgccctaacggatgattaagaattattctttcctcatgtttcagtgattatatttcataatagaaaattaaacaatacctgatataaaggaaatttaaccaatcataaacatcataaaatactatattatgtttttataaaatacatgtcaaaacggcgcttagaaattttgttttataaaacaaggcttgggtggtgcaaagacttacatatgaaaattgttttttttttaacatcattgttgttctttttttgtttgtcggtatcgttgttaatcttgtttcaaaagaatatcgttattaatctttgtaaaaaagaatggttatatatatatatatatatatataattaagaatataaatattttattataaataaaatagattaagaattacaaaaaatagatctcatattatatatggtccaaagaagactaactaaacaatgacgttgtcaaaatcaatgaaacgataaaacaacaaatatctactattttacatataaaaaaaagatacatgaatctgtatatttctaagatccgacaaagaaaacgcacgttacagtatctctggaaatggaacacggtttcgtggaaactagaaactacaataaggagacagccgcaacaacatgattcaacggcacacaactaaactaatcaagccttccttatctcccaagttttttttactagacctctaattacttttaattatagtccttctttaattaatcataatgaaagttccatacaatatttatgtatttgttttcttctaagaaattaattaccttcgcaagttcagtagtgatccagcttaccagattattatagagttgcaactattcgtttataatattattcaaaatataattgcatttcgtaaaagacaaaacaatttaaactctttctagtcagtcataaattctcttaactcttttgttatttcttggttgtaggcttgtagcatttacacaatttggtaaaccattatgtaacgtaattaacatttatatttcaataacaatttttatatataaacaatatctaaacgtaacacatctggagacagaaaacgtgaaactaataattaggtgaaaccaacaaagaatactaaagatgttgaacgtatttacttttaaattaaaaagcacaacagacgaaataaatcgaaaaatgcgtaattgagaaacaaaacggctaaacacagctaagatatggtccacgtccagccgtgacccacatgaacttatttgtaattttttcgtaaaatattattaacaaatatttttttcttttgaaaaattatgataaacaaatttatatgatgtattatacataattaataatacatattgaagcatgtaaggtttaaaaaaaattcggatattagtgtctatggaattttattactttttaaatcaactataaaactatctttttaaaataattcatacaaagaaatactttaattaaggattaaataattaatgtcagtcacgtaggatattatatatttttggagttaaatgtgataatttatttttatttgttactccgcgttgggcaaaattgcaaacagcaagcaaaaagctgcatacctttgtgtatataatacacatacacacacaatcatttcatgaaccataagcaacacacaacaaaaacttcatcatcaaggaaaaagaaaactcatctctgatcaaaaatcgagagtataataaatcatcaatggcggattcgtctcagaagaaaatcagaagaaacgcgataacacataaagcatggagtctcatgaagatggctcttctatggggaagaaaaggtggagttttcaaaaaatggccattgttcgaactacgtagcttgttcttcaagcatctcaaagccctagctcatcatcatagtaacggtgaccgttattacggagaacgccagctttcctttgatgaaacgccgttatttaacgtcaagaagaagatgcattgtcctacttcgtctatgaggttcctcctcctcccctgctttgctcctcccgtagattttgactatgactttgaaatggacggtcaagattattccgacgaggtacaatcgtacggttacgatgaatcttgttcggaagaagagaaaggggtggatgtgagagcagaggagttcattgctaagttctatgagcagatcaagttgcagagacaagtgtcttatttgaaatacaaacaacacaacgacgccgtattattatagatttatgatgatggttttatttactaatatgaatgaatgcagcttgtttttgtagataactgagtctatatatcatctaattacaacaacaaaaagatgtttcatttttgatttcatatgtacttcattttcctttttttttatgaatttccttttaccgtattgttgtttcaaacaaatattaatagataagtagtacattgtttgttaactggaagtcagtacccaatttgccccaaaacctaaaatattagtcaaatgcagtacgatgcaatcttaatagtttaggataggtgggcgcaatctagattgaatcatccaatccaatcatatatataatttaattcaagtttttttttcaatcttcctacacaaaaaataacaaatattacccgttttggtaatttaatatagagagttagggcatctccaaccctattatattttagagtaaaaatgcaagattcttctccaaccctactttataattgactcagagatttctgcagattgactctatatatagagcaactttatttttgagttcaactttttttatttatactttaatccctcaaattcaaacttttttatttaatacatatacacatagttttataaacttaacaatcaaacaagtactaaatttaaaataaacaacataagaaaactaaaacataaaactaataatttaatagtccggtaaattgtttgtagatccgccaaacatcatttttttttgaatcttcaaatgatcttttcgttgtgcacttgtcttctttagttcttctaaaagtttttttatttccttcttctaaggtgttgataaccgacgttgttatatgatgtaattttttcttaataaataattagtgtttaattcaaattatatcaaattttatgggaattttgcaaatctataatatatgaggtcaaattgtaaattatataattaaaaggtattagtatataaagtaaaaatagaatatttttaagaatattattttttagagtagaaatcctaactctattttaaagtaagatataaaactatacatttgagatgttcttagatacgaatttacaaaccatcctaaatatcaaaactagttaaataattaaaattttccaaggtacatgtcactataaaaacagccaaaagcttttctacatgctagtgtagaaactgacccaagaggtatcattaggggaatccaaattcaaaggggatacattcatcaaaagcagttggtgagcctccgttttttctagcatcatcggtcttctttgcgataaaagatgcaatgagatctagagccgagatgggtcttatcaaccaatggtttccactggacactcttgcaactccagagcgtatcaggatggcttgtttcgacgagtttacttctccttttgtaagtttagatttctgccccaagcttagtgtttgagcttttaactttcatccgcagggaaaatgttacccaaaacagatgagtatgctatttggataataatctacaaattctattccatcgaattaaaaattccaaaatatactctctttttttttgcatgtaaggattaattatactatcattttacatcctagatctagtgacttaacttattgttaacgagtagttttctgatattaaaagtaacttggagatgaaattatttgggcgagggaacggggacagttggccttttaattgctcgaagacagctaataatcaaaattaactatttcttacaagtggttcgtttagtaaaatactaatatgattagttatattgtcactatcatacaaaactaaaagtctgacatatttaattataactatcattttcataagagcatcgttgagattaacaagagaagacttttgagagataaaaaaacgtgaaaggagcatagctttcagatttgagatccaacgtttttcttcttcttcttctcttcatcttctttttcttcttcttctaaatctcgtagtatatgaccatggattctgagggagtgttaatgccgttggtccatgaacatcttatgatgccttggaatgatctaaggaaaggtgattgttgtggactctcgaaagctgtcagtgttggttattattgcaaaagctgcgattttttcgcccacaagaaatgtggcgagtcctccgagtttatccaacatccatctcaccccaatcacactcttcagcttcgaagtagcgaaggctgtaatagctgcaatttatgtggaaggaccattagtgacctattctatcgttgtgatctctgtgatttcgacgtggatctatattgtgccaagtatccaccaccagaggttattgacattcctgagacgcatcaccacaagctcaaccttcacaaggagttgatcgagttcaactgtgatgctaaatgtgggaagattactggtgctgagtttccttacgtatgttatgaatgtcaattacctttccatgtggattgcgtatggcggccatcggagttaaaacacccatcagaggtaaaccattcttaccactccttacaccctcttaagctcctctcaggtcaattaccggataattgtgatggaaaatgtcgtctttgcgcaagaaagattgatgatagattgttctatcattgttctccgtgcaacttcaccttggatctacgttgtgttttaaacccaccacaacaatctcttctgaatttgaaagctcatgatcatcaactcacccttctcccaagactcttgtcatttacatgtaatgcttgcgggttgaatggagatcgaagcccttacacttgtgttcaatgtgatttcatgattcatcaagattgtcttgacttaccacgcgtcataaacattaatcagcatgatcaccgtgtttctcgaacttctgttcctggtgttggaaattctaagggagtgttactaccgtggtttcacaggaagcatataatgatgccttggaatgatatgaggaaaggagattgttgtggaagtttggaatctgtcactgacggcttctattgcaaaagctgcgatattttcatccacaagaaatgtggcgagtcctccggaattatcgaccactcatctcaccccgatcacactcttgagcttaaccgttatcctaataaaagttgcaatttatgtggaaggtccaaaggtgtgaatgtatgctatcgttgtgatcactgttactaccaattggatctatattgtgccaagtacccaccaccagagtttattgacattcccgaaacgcatcaccacaagctcacccttctcaaggagcggattgagtttgattgtgatgctaaatgtggggagactggagatgggtttgcttacaaatgtcctgaatgtgatttattcttccatgtggattgcgtatggcatccgccagaagtaaatcaccctttagaggtaaaccactcttaccacccctggcaccctcttaagctccacacaggtcaaccaccacactattctgatggaacatgtcgtctttgtgcaagaaatattgatgatagattgttttatcattgctctccgtgcaacttcacattggatctgcgttgtgttttaaatccaccgccacaatctcttttgaatttgaaagctcatgaccaccaactcatccttctcccaagactccgttcttttacatgtaacgcttgcgggttgagtggtgatcgaagcccttacatatgtattcaatgtgactttatgatccatcaagattgtcttgaccttccacgcctcataaacgttaatcgtcatgatcaccgagtttcacgaacttctgttcttggtgttgtaaattctgtatgtggagtttgtcatcagaaggtggattggacttgtggaggtttttcttgtcagaggtgttctagctatgttgttcattcgaaatgtgctaccagaagagatgtatggaacgggaaagaactggaaggagtacctgaagaaatagaagatatagagccatatgtggtaatagatgacaatacaatacaacatttcagccacaaagagcattacctaagactccacgttaatgatgttctatgtaacgacaacaagcggtgcaaggcatgcacccatcccatctttcttcaatccttctacagttgtatggattgtgacttccttctccaccaaaattgcgctggatttcctagaatgaaaaggcatgtgctacacaatgagcgtcttactttagttactaacgagactaaactctttcagtgtgctccttgtgatagatggtccaatggtttcaggtaccaacatggatataagtcactcgatcttcagtgtggttcaatatccgagccatttgtccatccaagccatcccgatcatcccttatatcacactttactggatggaaggaatgagatttgtgatggctgcaaaaagagttggtattatgtgctaagttgcattgaagatgattgtagatttgtcttatgtttcaaatgcctcactttaccacaagtggtaaagcatagagttgacgatgatcctctcttgttatgctatggcgaaaaggcttgtggtaaatactggtgtgatatttgtgaaaaggaaaccaatccagagacatggttctacacgtgtaaagatcatcaatctagtatgcatacaatgtgtgtgcttggtgactctgtagggatcatgccaaaaagcacaataatgggttggtacaaatattatgaggtggtgctcaataatagtatatctcgtccagtttgcgagatgtgcaagtcgcgttgcatttttcctacgatcatgaagattcttgaagcctcaaatgaatacgtttgctctttagcatgcgtcctagagagggggtgaagatagacggttaaagccctcaattgaaataaaatacatgtgaaaccaggtttttctttaagatttcttgtattactttattttgcacgttcatttccatttatgagtttatttccttaaatgtattgtctaagaaacttgcagtcttaatttgatactagattttaacccgcggtatactgcgggacgatttattttctaaaaataatatatattaaaacttataaattttatttttataaaatatttttattttataaaaagaattgttattaagtaacgctataccacgaatccatgagacaattgttaaaaaactgaagttttaacccctattaaaacagcactagattttaacccgcggtataccgcgaagataatttattttttaaattagtatatataaaagtttgcaaattaaatctatttatttttattttatagtttacaattgatattaagtaacgtcctaccaaacccgtctcgccaaatccgtcccgtaaaaaaaaaccgcggtacaccgctaatttaaatatataattaaaataaatattttatgggattgaaattgtattttggtttttcaaacaaatatttgttttaaatagttgccaaaatctagttcaaattttggagaaaaaagatttattggatagataaagaatgtatttaggtgtgttttgctcattttaagagattgcaattatatttttgtttgtcaaacattttttgttttaaatagttgctgaatatatttggaatatttttagtttgttaatcaatttattgctggaaaaaatcaataattaaaagccaatggcaaccattgtaaataagtcccaactccaagatttattttacaaaatagctgcaaaaatgtatatatagatattaataatattttaaaattttataaatattgattcaaatacatccatcgtataacctaattccataataaaacccgttctataatttctttacccgtcccgtgtttttttttaaagtagtaatttttaaaatttaagaattatttattatatataaaagttttgcaaattgtatcattctctagtacatttatattttattgtttaattttatatatagtaacatcatacataccacataacatttttggttttatataatcttttctaaattaggatgatttgatatgtttaatattagtggtcttaagaataattaattaaagatttaacccgtattgaaacggtggattaattatattttacttttttattaatattgattcaaaaacccgtccctccaaatccatcttgccaaaaagccatttattttattaatattaattttatttatgatatgactctgaattataatctaaatattttagctaataacataggagtacaccatatttatttaataggagaatgtaccatatgacccgaatgcacttttatccaaatctaccaaaacagtcttgcaaaaatactatagagataaaaaaacaatagtcggatttgataggtataagattagcaaatatattaattagcaaatatacgctaattaacttgattaatgggacttcgtttcacagttccttagcaaatcacctggaggacatcagtttttgggcaaataaatttgcaagcattcagtttggttttattaggagaaagggaaacaaattagctcatgtcttagcgaaatatggttgtacttattctactttttattctggttctggttctttacctatttggcttgatcgatacttttgtaatgaccctaattgattaatataattgttttgacgtaaaaaaaaaaatatattagttagcttaaattagttaaaaaatataaattgaaaaggtatattacactttattcgaatatagtatcaaaacttatataacacagagatttgataattttttaattgttgaatatttttttttgtgctaatttttatgtgactaagatttaattgattttgtatataaaatattaaattgttttacgaactttttgtttataatttggtaacagatagatatttgaacattcagtatattttgcttcagtttaggaaatctttgatgacccgtctttagatccaataagccctacaactaagagatgaatattatcgttaaataattttggtaaccttaacgatatcattaaaggattttgtttttgattaaatttgtctaatgacattgtcatgtaattaattacaaaaattaaagttatatttaaaatgtacttctcaaataatatagtaggattatgatctacttgtttctaatgttttcggtacgtttttcttcagaatctcgccttttttttctttcaatgaatgtaaatttttttaaccagaaattcctttgttacctgcatccttaaatctactgtgtttttgaacgattaaatagaatttagggcaaaaagaagctgaaaacactagaatctcgccttataaatgaagaccaaaaacaagaaaatcacgatgactatttttaggaatcatctagacttttgactcgaagaatcaaactgtaaataatttcaccttgacaaataatatcagtcttgtctgttcaaaaatcataagtccaaaaacaagacaattgcaaatttgcgaggattactttacgaatcatttctacacttttgactcgaagaatcagacggtaaataatttcactttaacatgccttacaactatttaagtaaacatcaacaaacatacaaacaattgttatcatgcctcacaacgattttttatactgattcgactatacaaaattttgtccagcaatttccctcaagcgcgaaattgcttaaatagttgctagttattgctagttatttccacttggtcaggggctttcatctggtttttctcggaccctggggattaagggccttggccccgaaccttttggttatcagaaaaaaaaatatatatatctctagatttaaaacgattggaaaaatgagaatttaacaagaaaacacatggttaaggtttgccgtaacaaaagaggagctgttttgctttttaaattgttggtatgactacaacaagagactagtcttatggactacaagaacaatatgaaatcgaagtataaggaaggagtattgtcgcagattcaccattgctcctctctgtgttctctccacctatttagaaattgaagtatgtctctttgtgcgacaaaaagtctgtagtactcacaaaaacggatgacttgggtatcagcttccaagttacgtgttgtatctctctttcctattctgctgagatcatgttaccctttcttcaacttgatttgtctaaatgatgattttcgttatggtattggtagagtaatgaatgcaatgataattgattgggaaaactgactcactttagcttgattaaacaaaacggaacgaacaagaaccgatacaacatgtcagatacaaagttcatatgatcttatttaattacgtactggttataggacttatttgattacgtactggttagaaacttagaattaatcttagactaatagatgttgtgaagaaaagcttaaaagtaaatatatttaatgcaagtggttcgttttaataaaatcatatgaattccaaaaacatcaaatataccttcgtctatgatgttggtcatctagttgacactgtcaattaaccataattattatctttatatttaaaaatatgtctactaattcttctacaagaacattcttgagctcaatgagaagactttttgtgacaaaaggaaacgagaaaagagcagagctttgagattttaatttagatccaatttttcttcttccaaatcaaccatggattctgagggagtgttattgcggttgatccacgagcattctatgatcccttgtaatcatctgaggaaaggtgattgttgtggacgctttgaagctataagcgatggctactactgcaaaacatgcgattttttcgtccacaagaaatgtgtcgatgaggcctctgaatctatcgagcatccatctcatcccggtcacactcttcagcttctaagtaaacaaaaatatcgttattgtaatttatgtggaagggacattaaggatctatgctatcattttggtaacttcgacgtggatctatattgtgcaaagtacccaccaccagaggttattgaaagttctgagacaccatgccacaagcgcacccttctcaaggagaagatcgagtttcattgtgatgctaaatgtgaggagattggttatggctttccttacaaatgtcttgaatgtggtttgacctttcatatcgactgtgttttgcatccatccggggtaaaacacctgccagaggtaatccacccgctagacgtaaagaatcactcttgccaccccttgcaccctcttaagcttgttctcacaggtcaactaccagactattctgatggaaaatgtcgtctttgcgaaaaaaagatcgatagccctttgttctatcattgttctccatgtaacttcaccttggatatgcgttgtgctttaaacccgccatcaatatctttcgaggattcgaaaactcatgatcaccaactcactcttctcccaagactcgactcttttacatgtaatgcttgtgggctgaagggagatcgaagcccttacatatgtgttcaatgtaatttcatcatccaccaagagtgtcttacccttccacgccttataaacataaatcggcatgatcaccgtgttgctcgcactaatcttctgggtcttgtatattctgtgtgtggagtttgtcgccaaaaagtggattggacttggggaggttattcttgtcaaaggtgttctaactatgtcgttcattccaaatgtgctacaagaaaagatgtgtggaacgggaaagaactcgaaggagttattgaagaaacagaagatatagagccgtatgtggtaatagatgacaacacaatacaacatttcagccacgaagagcattacctaaaactcgacgacaatggtgttttatgtgatgaaaacaagcggtgcagcgcatgcacccattccgtttgcctcgaatccttctatggttgtatggattgtgacttcattcttcaccaaaactgtgctaaatttcctaaaaggaaacgacatgtgctacacaatgaacggcttactttatttacacgcgaggctggtcacttttggtgtaatgtttgtggtagaatctccaatggtttcagttaccaatatggggatatgaaattagatgtcatatgttgttcagtgttggagccatttgtccatccaagtcatcccgatcatcccttatattacatttcaccagagatggaagaagtctgcaatggttgtaacatgtcgggaactagaatgctcaggtgcattgaagatggttgtggatttgtcttatgcttcaaatgcgccactttaccgcgagtgttaaagcatagagttgacgattatcctctcttactatgctatggcgaaaaggcaaatggtatatattggtgtgagatttgtgagaaaaaaatgaatccagagaaatggttctacacatgtaaagatcaatgggctagtttgcacacagagtgtgtagtcggagacttttcagggctcatgccaggaagcgtagtaaaggctgagacgggatcatatgaggttgtgctcaacaagaatgtatctcgcccgttttgcaggcagtgtaagtcgcattgcatgtaccctatcatctataagatacctgaaacctcagtttcttatctttgctctgatatttgcataaagcgttttacaaagagagactgatgatgtttagttttgggctttgtgtgtcacacacgtttttctgtgttcaagaaattattagggtcgtttgaatatttttcctttatttttcgttaaggttttccgttgaatcctggtccaaggaggaatcgagtctttgagtataaatagagttgtatcgagtatttgttcttcagtcttttgttttaagaaaatcaataaaaaaacaaaaagaggtaaccctagttacccaaagagcttgtgtttgcatagcactgagaggagtactctcggctcattgttctagttcaagaggacgatcatcgtcttgcacgagtgtcacaaaattttgtttaacatgagcctcaaaacaacttgtcacgagtttctctatgagtttatatgtctaggtttgctaatctaaagtgtgtgaagccaacgcattcgtttttgttttatttttttctcccttgcacaaaaagatcattttcaatttttcattatgagttgattacttgatttccttcatgtgttattgaatttggaggactagtgattcttgtagtgattatcacattttcccactaggtagtttagtgtcagtttatttcttaactatagtgattttaaccatttacggtttacacaaaatacttctacagatttggtaaaacgattggaaaagagaattcaactagaaaaaagagagggttactgtttgttacaaacaagacaagctgtttttcattctaaattgttggcatatgactaaaacaaaatattcttaagaattaaaagaacaatcatgatcaaacagagtacaaggagtatagttgcacatttcaccattgctccttctctttgtgttctctccgcctatttaaaaattgaaatgtctttgtgagttccatacggtgaaaaatctgtagtactcacaaaatcttatgagttttgggtaaagaatcaaaccttttgtagttgtttatagccttcctcgaccgatgtagaaacgttttggacattgtagtctatccgatcaacaatcgtgccctaattgatacaagaatataagaaaactaattgttgagaagccagcaaaaactttgtatctagccagttatgtaattcataagccttttaatgactaagctaggcacctggtcaatcacaagggctgataagtctttcattatctgtgcaaggtcattcacggaacccagaacctagacagaactctgaagttaatcgccatcgaaaatgtgaagcacgcagcttcttaaatatggtcgagtaacaacttccattacctgttgtatctctcgttccctttccgctgagacatgttgcccttccttcaacttgattgtctggtgttcatcgaaaccctacaatttattgaagaccagcgattctcattatggtattggcagagtaaggacgacaaggttctgaagattgattaaaaaaaatctgactcgtcctagcatgataaccataagaagtgtttcttaaaaatgtaaggaagacaaggataactgattaaaaatctgaattgctctagctagataaccatattaagtccttattaatttgtcaatgatatatagttttacaatacaagtaagcacttaccatcccaccaagttcatcctcttcatccagtctcgacatctttccattcacattaaactctaaatctacttcatcctgaccctatgattagagaagccaaatacaaataagaacatcatattacggtacatgcatgtctcaagaatcaacactttttttgtttatttcttgaaaataaaggaaacatacctctttctgctgctgcagacgttttaagtaagtagactgttttctgcggagctccatggaaaggttctgaagatctgttgcaagagaacgctgtcaaaagcagtatgccaaaaagtaggtcaagtccattggagagccccactatacatgtacacagaactttatcctcatgctacaaactcaaaacatagaataacccaaagtacattatatagagggaaaaaaaaacacttcatacattttgctgactgataatgtcaactagataggtagtcaaaacatatgagagtgatttaacccaaaattcctaactttcttctctaaaagcacaaaagaaaaggtaatgaccatgcattctttattgttaacaagctcgattctgaaaaagtgtccaacaacctacctgcacatttttcctgagatttgattcttcagaaggccctctagtagataacatctgcaatctcttttctgacttcctcaacaaatctgtgatctcatgagtgagcatctcgacttcacgatgaatccctttgttatctccaaatgtaggcataagagcctttgaatgtgcctttgctagttcattcattttgtctcgcaccttttgtatattaaaagttatctcctcagaatcatcaacccaagctggtggcataccaattgtgaaggcatcactactgcaaacattcacaacaacacttaaatcatttgctcattctgttacctaattcgtttagggttctaattctgtatctcaaatcaatcccatgattacaattcgtttctatatataagttcatagaatttcccaggttttgcagaatcaaacaacacattatattattaccttgatggaccaggatcataggaattcaaaggagcataagaggagtgattggaccgggaaaatgaaccgctaaccatttcgatcaccggaccaccgaacgaatcagacgccgataaagataatggagcacgcgcgctcttacacgcatccctgtgtttccggtacaccgtcgttcgattcctcgtcgccatcaataccaaatcaattgattctcaacagaatctcgaaagtaaaatttcccggagaaaataaacaaaatcggagcttttgtcgtcggcaaaagcaaacgaatctgaatcgcaaaatcgtttctcattagcgcgtgttacagacttagcaacgaaggagaagtatttgggcctttttaggcccatttatatattgggcttatagtccacttgcgcgatagggtcaatataagtgtgtggagcacacgttttaagacggtggcgcaaagacgaaaatgcccgtagattcgtggcggctaaaagtcaacagagggacgttggtggttcagggtaaaagaggctatagtgaccggttaggggtagtttggtcattggatttagctcaatagattcgtgtccatggattccctcatgtcgccagagaaaaagaccacatttaaaggtcttgcctttttggtgtgtttcctcgcactttcaggctgaacaaagtactgacagatgctaataaatacacggaggaagaatatgctcctttaattattatctgagatttttcaattcaagttcgtgtggattcagaatcaaaatggaagaagatttgttgggcatttgtgggtttgattcgtcgaagaaatatcgattagaagaacttgccaagtatcagtcgggttagtgtaaagatccattctttttcccaattgcatttagctttgttttagggtttatgctttatatgcaggtggttttaatttctttatcaaatttcaattcttttggcccttaaggtctagtgagtttaaattttgtcactttatgggtaaactttatgttatgtaattgataaaagttttgtgatggtgaaatttttgtttaggttcatgtattgagtttgaagatgatgatgaaatggcagtggattatccatgcccgttttgctcagatgattatgatttagttgaattgtgtcaccatatcgatgaggagcatcaactagacgccaacaatggggtaattgcaactcgtatccatctcccaaatcagttactgttctttaaactatacatttgagtttttacatgaagcagttagttgtaaatttagactatttatcgtgtgatgttcattgttgtactctaatggttactttagtaggcaggattgtgattctgtaaggagagttggtagggacttcttggattttagttcacttggattatttgcttgatgctatgaggaaccattttgtagttgtgaagtgtttggtgtgagaaatgaaaacagtcttttggtgatgatgaatgtaataacttctcacaaattcagctttggttgtgatgtagatatgtccggtttgtagcagacgagtgaagatgcatatggttgatcacattaccactcagcatagagatgtcttcaaggtatccttttttatttactcttcttgctttcgttaccatttagtagaaaacttgtaagtctttttgtgcttattctatatcttggtatgttttatatcggttatctgacatttgtgttccttgacgaatacttaccttgaacaaaagcagagactttacaaggatgagtcatattcagcattttctccagggactaggaaatacttacagtctctaatcgatgagccgttgtctactaatcatacatctaaaagtgttctggacccattattatcatttatatacaatccgccgtcaccaaagaagtccaagcttgtacaacctgattcatctagtgaagcaagcatggaagacaatagcttaataagggattcaacagaaaagtaagtaattctttgacattttcttgattctgcttgctttatctcatcttcttaaaccttgtctaaagatacatttcgtatttctgtgtgctcagagactgggaatcgccgtctcccttgtcagatacagagctactagagaaggcaaagaagagagagtttgtacaaggtttaatatcatcagccatatttgatcacatttacaacttctaagagcataagtctttgtatatgaaactctcgcaaagtagtctgtactctgtagtataagccaatgagcttctgtttatcgtcaaacttctactttgcttctttacagctcataatcctcaagtcacttgaggtcggagtttccttaacaaccacttcttgcgtagtttcacatctagagccaagaaagttttcgccttgagtttatcttcaagcagatcacaagcatccaatataagttcatcgtccatgtctggtaacgcttgaatagcctcaaccgtgtcctctattgacatggtttgggtttcatcaactcgaggctttttcgggtttatagggcttgtatcagtattagcaagttgatctcttttgttcttggggtcaaacaaaagagagttgctatcttcttcctcagctgaaatagacaaatctgtagtaccactggacttaaattcttggaattcagtttcagggtcaaaccaatccatagctacaaagcattcgttttcttcgatcccagaatcgccacagagcacacacagatctttatagtacggaattggccgagtcataaattgccttgcatctctatgagcctgtgattaattcagacaagaacacacatcaaaacagagacgaaaacactgtaactaaccacacagcatagatcagagcgattaagttacctttatatagtcttgccatacattattatcagctgtaaccatttgacgctcattatcccaagcaaacccatctgatcgaagaatactcttgatcgcgttgaactgtcttctcagagacttataccggttcttcaacacatcaacatcaaagttagactcaaatttcgcattgaagagattaaccatctcagtccatgcttgtttcctgaaaacaccttcaatctggtttcctctcctcgcttggtccaacatcagatcaatgaaataccggtccattggaggatgccaagtagtcctgcaccgtgtgacactgcttccttttgagttagacctgactgttgacgattcacatattctgttgtacccatcatcttcctgaatcagtgtcttggattctccctcactaatactctcctcagctgaaacatacatattcattcacaggttacttaagaatctttgatctttggtgacaagaatgtacaatgaaggattcaagtaacaatcaatagattaaagattgtacctttgtgctcagacattccatctgagtaaaccaagcacagatctttgtaacaaggtatagactttatccgaaaagatctcgaatcaggatgaatcttcaataacccaaaagcaaaaacaaatcaatccctgagaagaagacacaaaatcacaagtaaacaaaacgcaaaacgcaccttaagatactcatcccaaacgcagttatcagcaacaaccatctgtctagtatcatcccaactaaaaccatcttctatcaaaagattattcacagatttaaacaagttcctcaatgtcttatgcctgtttttcaaaacatctttgccataaagaaacttgaacttggcagtgaaggaacaagacatgaacttccaagctcgtttactaaacaaatgatcttcaaatctgttgccttttctaacttgttccaccataagctcgatgaaatactgatccatttcaggtgtccacactgttcttaatctctcattgccgtttctactgctcattatctatttctcccttcttctttacctgcaaaaaaatcgattgcaagaacacaaatttgaaatcgagaaatcaagttataaaatcagaaatcagattctcgtaagaaactggatcagacccataatagagattcgactaaattagctaaagagcagagaatcttcgcttacagagagtcagagctccggtgaacgggagttggagtaccggtgagattttaaggataaggttgtccgggataaggttatacttttattcgtaaccaatttagaaacctttatgggcttatattactttattgggcttagtctattataggcctatgttaaacgacatcgtctattctagggtttgtttttgggccagagtgacgtttgttttcctttcgtcgtcgtcgtcgtcgtcgtcttcgtcttcgtcttcgtgaaagatgtttacaaaattttgctgtttaaattgatagaagaagattcgacctttaaaggctatctgaagaacatctccatcatcgcctggtgttgtaagtttcttttggattttgattcttgttgatactgactagtgagctcatttttaacatttgttcgtaccaattctgggatttgtaattagctgagtattgagctctaaatcttgaaaaattagtgagtttagtattttgcgaaagacccattaacagattatgatttgtgcgttgtttcttgccaaatacttttgagaggtttatgaaacagagtaaaaccctagaattcaattcctttgctctgttatgcagtcttcatttcatcaaattcaacacagaagattcgatgagtagcttcaacggagactccatggatgatttcaaaggcctccgaataactcagcttgatgatgatgacgatgatgaaactgcggtggaacctataaatatggatgaatttgatgatgatgatgaggaagatgatgaagattatgaacctgtgatgttaggtttcgttgagagtcctaaattcgcatggtcaaatcttcgtcaactgttccctaatttagctggtggtgttccggtactaagttaaaacatctttcaatttgtgcaatcaaaaactgtttcttctttatgttcttaggtattgattctttgggttgatatttgtcaatataggcatggttggatccagttaatttaccatcagggaagtcaattctatgtgatctatgtgaagaacctatgcaatttgtacttcaagtaagtttcatacaaactattttgttgtttcttgcatgttttttgtcggtttatttatgaaatttgttgtggaaatttggcagctttatgctcctttaacagacaaggaatcagcttttcatcggacattgtttctcttcatgtgtccatctatgtcttgtctccttcgtgatcaacatgaacaatggaaacgtgccccagagaaggctatgcggaggtagaaagaaacctcttactatatattgcatctttgtattgtttgtctcctctccaagtgggttgttacactaaagtactgttttttttgttcctgaagtacgaaggttttccgttgccaattgcctcgagctaatcctttttactcgagtgaggctccaaagcacgatggaacagacaagccattgggtcatggaggtattatgaactgattgatgggtttgactgaatgccgagaattctcttttaattgtcaattcttgatattgtttgtttcactttagctccgctttgcacttggtgtggaacatggaaaggagataaactatgtagcggctgcaaaaatgctcgatactgttcaccgaaacaccaggtgtgtgcatatgtgcatcgtagtttcttttgttccgctagattctgctcttttgagcaaatttgaacaatctgtgttgtttctaatttccaggccctgcattggcgcttgggtcataaaaccgaatgccaacagcttcgaacggttagcgaaacatctgactcaggccctgtcaataatggggttgctccaactgaaaagcagaaaggttagctgaattcacaaacttttcctagccctgaaactttgtataactagtgatatgaatttttcggtttgtgcagttgcgagtaagagtttatggaaagaatttgtattgatcaatgaggatgaaagtgagtatgatactgagatgtcaggagatgatgaagtagctaaacctttggtctcaaagagagaagttgacgaccaaatgaaatcgctaatgaacgattttgaggtaaacagttcacttgtcatggccatttttgcaaacttcaaaaggcctcaaatgattctcattttccatgcttgtacagggagatgctgataaaaagaattgggttaatttccagcaacgcgtagacaaagcccctgaacaagttctgaggtgtgattcaaacgcttatgattttctgcatacttttgatcttgattctcccataacatcgatttgtgaaatacgtattgatacagatattcccggagctctggtgctaaacccctttggccaatagcaagcggacgagtctctaaatctgagcttcccagttgcaaatcttgtggtggtcctcgttgttttgaatttcaggtaattctttcttctcttctttataaacttgtattagcttggtcttagtcacttcttttgcttattttataaaccagtcaagaattggccaacaattttagctgaatcaaatcaactttaaaccaataaaacacacaattttccccatttcatttctctgttcttgcatattggaagcttggctctgttcttgatcatttcgatggcggttttatcaggtgatgccgcagctactgttcttcttcggtgggaagaacgagagggaatctctcgattgggcaacaatcgtggtgtacacttgtgagaactcgtgtgactcgagcttaagttacaaggaagagtttgtctgggttcaactatacagtcagacaacttaggatcctctatttccttcctggctgttgcctccaaagttttgttcttaaccggatcgtaccggacttaaatatatttgtaaacttgggtatgttacttggtttgtttaaagattttgttgtgtccatagtaaactttatatacaagatcttatatcttgtgatttactagaacaaacatactatattcctattatgattttgactcatactatattattgacttttatggataaagctgtttgatttctcttctaattcgcttatgatcgaatcttaaccataattatgtgctaaaaattatagatagtgtattactaagatggtcgagagagaaaaggacttgaagatagaattaagtctcctgaaacagtacgaactactgacaaaggttctcatatttgtgacaaataaagagttttcacaaagctatatcacataaaccattcaaaatcactgcttataagagaattcactaccgagcaagctt

SEQ ID NO: 513 - DNA, 48689 bp, Arabidopsis thaliana
aatatttatattgtatctttattctcatgaaagtctattataattctttctaaatactcttgtgttctttactctcatcagtttatcaaaaatagcagatcatatcaaacaaaacaaccaatatgacttaaatggttattagaaattttaaatcacaatcaacgagaaagatcaaaaaaaaattcgaaaactgcaagcttactcaagaaacactagagtcgaagcagaatctcaatctcgatggttgtgtttacaaaaaattaagagtctattgttatactttaggtatcaatcatagagaatttgttttgaatgatgatgtgaagtaacaatattggttgtttaaaaatctttagggttatagattttataaattgtatatgtcggtttggatttataaaatagtggttagggtttagattttacaattaaataaaaatagatgtcggtttgagtttataaaagaaatagttaggatttagattttacaagtaattcgatttaattctttttagtgaattaactttttattttatttagataatattgattgttttaatttatttaattagattatattgtaaattttgatcggttagttaagaagaggtgattaagagaggaatagtagcccaaaggatattgactccctaatatttcctaattgccaaagcataacgatccctaaaatttcgttattgacaaacgatataaataaaagttttgactccataatatttcacgtgagcataatattgtgtaaacgattccaagagggaaaaggattactattcctttatataaagaaagctcatgttggtgtgattataagaaagcaagcaaagcgatgttgatatttgatttagagagacacttgtttaggattagggccaagacaatgtctacgacggccaaggaggccccgtcgtcgttattttcgttactgccaaacgatattgttttaaacatcttagcccgcgtgccaagatggtatcatccaattctctcttgcgtgtcgaagaacttacgatttctcgtaagttcctctgagcttaagattacgcgatctcttttggagaaagatcgcttctacgtctgctttcaagaacatagtaattctccttccttaaccacgtatcattggttcagtttcactgagaatcgtcgttgtttggtctcgatcccgttcacttctcctgttgagccttactttgcaactctcacgctgggccccgaaatctactttgttggcaagtctaggagcatgtggatcctcgactctcggtctggaaagttgcgtcagggtccaaggccgcttgtggcctgtgatcaggcagctgtgggactagttaacgacaagatttacgtttttggaggaattgatgacatgaataaaagatactacgaaggtatccatgcgcaagtgtttgacctaaagacacaaacttggcatgtcgggccaaatctcagtgtgaaattggcatgcctaaataggtctgtggtaaccccgtcactaggcagaaaaatttatgtgaggggtactgatcgagacgtcacaatctatgacattaaagatggtaaatgtgacaagataattccagctgatgatttcagcagtggagatatgtgtgtggtagacaacgtgatctacatgtattaccataatgttgggctaatgtggtatgaatctaaggagaaacaatggagtgtggttcatggtttggagttcaacggggtttttaatagcatcgcaattgctgaatacaatggaaagttggcttttttgtggcatgataggaacaaacgtgagatttggtgtgcaatgatcaacttgtatgggagtagtaaagtagcaattcgagggcgggtcgagtggtctcatcgtctactttctgatctcccttctaactacaactttaaacattttactatttgtacagattattaaaagtaatcttccttttttttttcttaacctctaaattatatttagaggttccagtgttcccgtagtataaatttcataaattctcttttttatattttgatttttgttgccatctagattttatatcatggtacatcaaagatcattttttataactaaaattttaaatttgaagttatatagattatttgtgttgtttagtgttttagattgtataattatattatagttgttcactataagatttcaccagtagtatactgtttcgttttaatatcgactcaaacccatttcatcatataatccaatttcgtaaaattaaatattattttattattttttataatactttatttaaaagacataattcgaatcaatttaaaaaatttctttaaatggttctcataacatatagattttcaacttttatagagttaacatatcattaatgagtgaacagctattgtattggttttaatttgcttccgaattcatgaataattcttgcattctctggttgcagcttgagcaactgattgtccaagctggtggtagaatccttcaggtggatatataaactagactggtcgagaacagaacaacaagatgatgatgatgatccagttgcattccttagcggtaatactcggatttgttgtttagaaagaaagaaaaaaaagctatttagaatgtgtgggtaaagagaggtgattgttgttcatagatcagtacgatgtatctttgatatcatctattttgactcttaaatctttgatagtgatcttatctgaatagtatgaatttgcatctcataattaagaccatatgaacaagagcatatatatacaaacacaagaataatgctagaaacagaagcatcataagaagcacaaaattttcttgcagcaagccagcaagtaacacttgattctaagtcagcaagtcatgatgctcctgagacatggaagtgttcaacgatgccagaaatgtagcaatccattttcttgcagcaagccagcaagtaacacttgattctaagtactccttattttgaacagctcacaaaatatactagtacattacaattacatggttttcgttcgatgagataacctatatatcaaactgaatcaactctcaaagatagtcattttttcatcttcaacttattaagtaaaggtaaaactctaatttcatggatatagagtatacggagacacagtcaaatatatatttgagttagaactaaaatatagtttgtaagtttctaatttatttatttattttattgaagctactatatgtatatgtattcggaaaatttgtagtctatgcattttttttacgtagtaggaaaattcttaattttatttaattaattacttaaaataatataatcaatttgaataaattagtttaagttgaattaataaattaatactataatctaaagaattttagtttgactaacataatattcttctccccagtttatcttctctttttatttaatatgttgtatatgttcttcgtatttatattgttacttttgggagttgatctaagaaccacaatctttcacttttgttacatttcagttttgtcttttaaaattttctactatcactacaatcttaaagaaaaaatgataaataatcatccaattagagaaaaaccaaaacacattattttcaacttactgtcactaatctttttcctaatcttcttatccaccgttgtttcatctcaatcaccatcatacaccactcacaaaacccagcgtttaaccgaaaccaaaaccatccccgagcttatcatcgcggacttaaacctaaccatcttaaaggttaatctcgcttcctccaacttctccgacctccaaacccgtctttttccaaacctaacccactatgaacgttgcgcattcgaagactgtctcgggctactcgatgacaccatctccgacctcgaaaccgcagtctccgatcttcgatcttcctctcttgagttcaacgacatcagcatgttgctcaccaacgtcatgacataccaagatacgtgtcttgatggtttctcgacaagtgacaatgagaataataatgatatgacgtatgaattgcctgagaacttgaaggagatcatcttagacatctctaacaaccttagcaactccctccatatgcttcaggtgatttccaggaagaaaccttccccgaaatcatcagaagttgacgttgagtacccgagttggctctcagagaatgaccagagactccttgaggctccggtacaagagaccaattacaatctctcggtggcgattgatggtaccggaaacttcacaaccattaatgatgccgtctttgctgctcccaacatgagcgaaactaggtacgtacataaatcttaatttaatgtagtcaagtatcaacgttaacatttgaaaaaaactaattacaaagatggtaatacctagtgatgttgatatgatttaacaatatttaccgatcatatagtatatgttgaatataacaattttgttcatttaatttacttatatatatatatatatatatagtttttgttgatacttgactacattaaattaagatcatatagttatgttgaatagcacaattttgttcatttaatttacttttatatattttttgttgatacttgactacattaaattaagatcatatagttatgttgaatatcacaattttgttcatttatttacttttatatattttttgttgatacttgactacattaaattaagatcatatagttatgttgaatatcacaattttgaccgatcatatattgtttattcactttgttggattattaatttcgtcattctattccgtatgcatgtgattttattagtaattctgcagaagaattctcaatactttcgcgatattccgtatatgtccagtaccattatttataaatctaatatgcacataatattttttttttgggtagatttattatctatataaaaggtggggaatattttgagaacgtcgaattacctaagaagaagacaatgataatgtttatcggagatggtatcggaaaaacagtcataaaagcaaaccgcagccgcattgatggatggtcaacatttcaaactcctaccgtaggtttgtctctgaatcccttggttttgtagtgctaaacatgatttacttagctaatcttaaatctcaatcatgtcttaagaaactatataaggccatttgtcgtaacgaggagagatgaatccggtctatagcatggatttgattgggtcttataaattatttaatctaatggaactctaaaatttattagttcttgaagaaataaattgtcggaaaaatgaaagaaatactatgttttagtttcatttagttttataaagatagtagattttaacccgctatacattttgggattatatttattaaaaaaataaaaatttaatttgtttaatagattaaaaatatatatggtttaatgttttgtattttttaaatgtacaacacttatatctatttctatattatttagtgtacaattaatatgtttgatttttactagttaaaactatagcaacaataacatatagttcattaagttaaaatgtaaattataactaaattaacttaaaatttaattatatttgttttgttaatattttctgttttgtttggtgttttagataatagaattattattttattgttatatttatgatttcacctatagtataacatctaatattactatcgactcaaacccgtcataccatctaaccccgttcagtgaaattaaacattattttgttatttattcttaataatactttaatttaaaagatatataattcaaatcaatttaaaagttttctatcaaatggttatttaattgttataaagttcacatgttattaatattctaaatccgtctaaccatctaaccccattcggtgaaactaaacattattttgttatacttttttttaacaatacttttcttaaaagattattaattcaaatcaatttttttaaaatggttatttaatttgtatattatttaatttgtatagatttcacatattataaatattctaaacgtttttccgtcaaattttctaaaagtttaataaactttaaataattataatatttaacctttaaaaaagtataatattaataatgtcctaatttttttttttaagtaattagaatcgatggagatatattagataaagaaatattagtagtgaggaatattaattaattgataagaattaattcattgtaaagaaattccaacttgaatatatatttgataaaagtgcatatgtaaatagaccatgttgttcaatccaaatataatacacatttttagaaattgcttgttagaacatgatatatatactcatctaaagatgggcttagaccaaattacatcttgagcccaaataaaaatccattttctgtttttatctacacaaatccaccctaaagatttatccacatcaaatatattttcatacatttcttctgtgttttttttctaccttcctaaaagtattaattatgacataattgtttatgcaggcgtgaaaggtaaaggctacatagcaaaggacatatcattcgtgaattctgcaggaccggccaaagcacaggctgtggcctttcgaagcggctctgatcactctgccttttaccgttgtgagttcgatggttaccaagacaccctttatgttcattcagccaaacaattttatcgagaatgcgatatatatggtacaatcgatttcatattcggcaatgcggctgttgtgttccagaatagtagtctttatgctcgtaaacctaatcctggacataaaattgcattcaccgctcaaagccgcaatcagtcggaccagcccacgggtatatctatacttaattgtagaatcttggccgcacctgatttgatccctgtgaaagaaaacttcaaggcgtacttaggtcgaccatggagaaaatattctaggacggttatcataaaatcatttattgatgatcttatacatcccgctggatggttggaggggaaaaaagattttgcacttgaaactttatattatggagagtatatgaatgaagggcctggggcaaacatggcaaagcgagtcacatggcctggttttagacgcatcgaaaaccaaacggaggctacccaattcacagtcggtccatttatcgacggtagcacatggctaaattcaactggcatcccttttagtcttggtttctaatcgttaaatttgataataatgaagcaatctgttgtaacaatcatatattgtatcgtaaacattggacttaaacttaaaatgttttttgtcaacattcttgttaagttttattgcatgcatagtattggtgtagtactgttttaaagctgccttggattcaatgcgacatgagtatgtaaatatagctatggctagtctatcgatattgtggcatagctatatttacttagccatgtggattcaaaggtcgaattaccaagtgagattttgtatattgtggcagattaattgagttcttaatttcagtctgatattttgagtgaatatgatagagaaaaatatggtagaatttaaagtattaaactagttaaatgaaaaaaattatattagaatttggtcaaagaaacttatttatttgtccacatgtgtaatttaatatttccgatgaaatttgtagcctttaccatctgttttctaggttgttcaataatggaaagacttttacagtgaagcagaaaaaggagaataagaacatgaatccaaagttcggtttttatatttttcctctttatatcgtgttgttttgttttggagggtcataatgcatgtggaatcatcacagaagcgcacatgataagtacgacattcccatcctctccattattattattcaacgccactctttatacttatacatatacaaacatacattgatatccattttatacatatatcactatatttctcacaaattttaaacaacaatatccacatgtgattagcttactcgacgagtagaaatataaggagttttcttcggcaaagaaagaaaagctaagtcttatgattcattcttcaatagtcgggaaacaattatttggcatctggaatggggactgttgtgcgaggacgcactcatgggaatatcttggaggttgagtcgcgattcgaatatgcgagaatgcctactatggtagacggataagcatatcatgaaacagaacacggtcatgtaatgagggggacaaaaatggaagatcattttagagtaagaagtagaagtatggccgtgtgatcaaacctaagggttgaatcaccatgacaatagtacgtacataactataataattttcataaaacgtttaatttacttgtgtatggacgacaaattttaaaattatgtagaataaaaaaagaaggaaaaatgacgaaatcttatatatatatatagacatgatgtcttccatgcttaatgttttggctcaaaatgcatcaatttttattttatttttcacttgttaatattaaggtaaagtgtatatatctcattgctagccttagcatccttgttgggttttggacgtttcttcatgcagactaaacttctgaaaatattcactaataacactaaagcaatgttgtgttaaaaaagaaaaaaaattgttgtgttaagatttcattggctataaattacgtacaactaaaattattaaataaacacatatttttaatttttgtttatattataaacttaatgatggattatactcgcatatgggattcatatataatagatggctcagcccgaaaggcaatgaaacattccaaaagtttgtattcacaaatcacaatctatgaaaaaagaacaattgcatttcctaaagattgaacatgtaaacatgctgcacaagaagtcaagaaattcattaatgagaatcaaatgctttactatcaataatgattaattgctataaaaaatgtgctacaggtaaattaaaaggatttgattgattctgtctttcatcaaatttgttttattataaagaaaaagacaaatatttgagaccctaattaaaaatctaaaacagtttaactttgagtctcttgacaaatttttaaagttataggatgctcgcatgctttcctttgccgtgagttggagaaaatcaaaagatcatctcattttgtatctccccatacactttcagtaaatgtttgaatgtattcataaatgttttcggcacaaattaagccaaaaccaaactacagttcgacaccatgttgtaattttgtcgataacaaattcaaactttcgattatgtcttgtttcatttggctctccagacgaggatttaccatatttggaaagaaaagaatgcacattgacgtctacaagatcactatccgattgtccaacctcgctcacaattttctgaatactaggaggttatggccaaaatccgtaatccttccaagcgcgaaaccacaacatataatattaatttcgttttaaacgtcattcgaaccgacgacctctaagctttacctattatctttaccagttgagataacgatacttggtctcgctcaaattattaaaaatattgttcgagaccattttgtctatctccactatcccgaaacaagcaaataactacttctagttcaatttgtaaatatcaaatatcaaatttgaaacagtttaaagtttggaacttgtgagaatatagaaaattgtctagataaagtgaagcagtatttacctgtgatataatttgggccctcgacatttagtataattttccgtaaatcaagtgattggcttgccgataagttatgacaatcattgctgtaacgcttttaccgtacattattattcaaataattgtaaccttttcttagcagaacgcataacaatttctaattagcgatcatatattacggattcgactataaagaacaaaaccactactatagttcctaataattgttatagtggccagagtttatatagttcattatagattcgtattaaaaggctgatcacatgcacacatgtgtatgtggaatgattgaaataaagtcatgcaagtctcatcatcatcaatacaatctactcaaaaacatgtgtccatgaatttgtctagaccggttaatggttcaacggttgctatgattatttatttggcatttgtatagctaaaattggtacctacactatctatatacatgacttaagacgcatagataaacaaattgaaaatacatgatagaacagtaaacactaatatatatgccatttggttaatcgaatcttgaatcataataattcataacgtccaaaaattatatcgtgtgagtaaccccacactttagagattcgttccctcaaatttatctagtaaataattttgaactgttttacatcctttattaaagtaatacattgatctcgaacacatattataaacgacaaattaatcatgaaatgtgtgctcatttggataaacaaacttattattttgttaaataatatgatttgaaggctacaatgtcttgttgggaaacataggtttgcccgtcaagattcatgaaggacgatttttagacacaacataaggtttcactaatgaagatgtgaaaatggactcatcgttctaagtaaaaatggcaaaggagaagctaggcccttgcgaaaactaacccaaccaggcaaccaatgtcttcatcatccgtataagcgtgttgtcctacacgtaaccatcccttgaagaaacagtcgacaacaagaatcatagacaattgttgttaaacaatcttttgaggttacataatcaattcatgatcctgatccaagcctagctagatgcatgtcgatctttcattcgttgtagtgacgttaatactcaaaatcggcataacgtaaacaatatttttttttacctaattgaaagaaaatataatttgaaatacatccgttttgtcatttacatacttcacaagcaccgaatcttatccaaatgtattcaaaataaatccaagaataaaaccagatacataagtaaaatgaatctttagtcataacttagatttgcgaatgggcttccatctcccaaacgagtcgaaacaagcacaagtacggacaataacttattttcaatattttccacaaacccctcaattatttctttattctaattttggacaaaaactattcaaattagtcatttttttgaagttacatctttttccttctgacaatccaaaaatcacacaaaaaaaaattagtcgaaaaactttttaactagtcacagagcgaggagagagagagagaaccttttttttcctctataaaaagctgagccacttcctctgtttcccacaaagcagcttctgcaacctattcgttggttggttaatagaagctctctttctctgtctgtctttctctctcagagaaatggctcttcttctagtttcttcttcctcctcctatgccctcagagtcaccattttcttgtctttcttcttctttctctgcaatggcttctcttaccctactacttcttctcttttcaacacccatcaccatcgtcaccacttggccaagcacaactacaaagatgctctcactaaatcaatcctcttctttgaaggccaaaggtcagggaaacttccttctaaccagagaatgagttggagaagagactctggtctctctgatggctctgctcttcatgtaattcacctcaacttttcctcactctcttcttctctttttatgaaatatatgaaatgggtttcgttggttaatgagagatctcaacaatgtaggttaagtgttgtatcaatatcgccaaaagattcaacctttttacataactctactgcatcaaaaaacagaggataaaattagggtttttgttttttcccccttttttctaaaatccctaattttaacaaaatgggcttgcttagaaagctatagatctcaagattctcaacaatgtaggttaaattctgtatcaatatcgtcaaaagatcaaatctttattagttgttttctttcccctctttccaaaaaatctctaatttgtgtgttttgttgattaggtggatttggttggagggtactatgatgcaggagacaatatcaaatttggtttcccaatggcattcacaaccacaatgctttcatggagtgtaattgaattcggtggactcatgaaatctgaattacaaaacgctaaaatagcgattcgttgggctactgattatctcctcaaagccacttcacaacctgacacaatctatgttcaagttggtgatgctaataaagaccattcttgttgggaaagacctgaagacatggatactgtaagaagtgtgtttaaagttgacaagaacattcctggttctgatgtcgccgctgaaaccgccgctgctctagccgccgccgccattgtattcagaaaatctgatccttcttactccaaagtcctcctcaaacgagccatcagtgtataacatttttttgtcatactttaataattttgtgacataaaaaatttcttcaactgattttttttttgtgtttttaaggtttttgcatttgcggacaaatacagaggaacttatagtgcaggattaaaacctgatgtttgtccattttattgctcttactctggttatcaggtaaataagtaaatgagtttttcctttacatgtaatgatcagattttggaaaattgtgaaatttaaagagagatttgttattttatgatatttttggtaggatgaattgttgtggggagctgcttggttacaaaaagcgacaaagaatataaaatatttgaattacataaaaatcaatggacaaatccttggagctgctgaatatgataacacttttggttgggataacaagcacgctggtgccagaatccttcttactaaggtaaaatctaaatttataaagttttgttatatcaagtccctaattatttttgttggttttttttttgtgtaaaggcatttttggttcagaatgtgaagacacttcatgaatacaaaggtcatgctgataatttcatctgctctgttattcctggagctcctttctcttctactcagtatacaccaggttcttgcatttttaatctttcactaattttcacttcatttacatgttatggtaattattttgtggagttttttacattatgaactttttctgttttggtgtttttttagataacctattttagagaagatatttatttgactgaataaatttgctctttatgaatattaaaacatttatatacatatgttatgtaggtggattattgtttaaaatggcagacgccaacatgcaatacgtgacgtcaacatcgttcttgctcttaacctatgccaaatacttaacctccgccaaaaccgtcgtccattgcggtggctccgtctacactcccggtcgtcttcgctccatcgccaaaagacaggtccagtgttaaaaatctctcaatctttagattttagattattttgttaaatataaaatttataacattttcgtaaattcttttttgatatataggtggattatcttcttggagacaacccattaagaatgtcttacatggttggttacggtccaaaattcccacggagaatccaccaccgtggctcctcattaccttgtgttgcaagccacccggccaagatccaatgccaccaaggatttgcaatcatgaactctcaatctccaaaccctaacttccttgttggtgcagtcgttggtggtccggaccagcatgatcgcttcccagacgaacggtctgattacgagcagtccgagccggctacttacatcaattcaccactcgttggagctcttgcctacttcgcccacgcctatggtcaactctagtttagtaacgagtgtgttagtttaagtaaaaataaaaatgaaggaagttttatctttgtttttacttttatttgttagtaatgtagtggaccgaaaatcggatcacaagtggacattggtccgagggatggtttatttggttcgttataatataacgtcaagtgtaatcttattgtggttattaatgttatcatcctattaattactatatccatgtcgttaatttttgatatgtttatatgatttttcatatttttgggagagtggatagaatctccagctgtttagcgttataatacacgagtgatgattttgggatttcttgattggttcccactttcttggagtgttgaaaaccttacaacattgtaaatatgttaataataggtaaaatactctttaacatttgtgtgttgatctcttaaaacaaacttacaaaaaaagtaggagaattgacatagaataaagcaaaataaatgatgtagcgtatagaagatttgcaacaatttaatttaacaagtcaagtggaatatcgagttccgggattattggtttcattaaacaatctcaccaagttgaaacatcgagattctaaaatgtagtattaacaaaggtgactatgagaataaaagtttcaactaaagaaatcctactatattatttgggaagtacattttaaatataaccttaatttttgtaagtaattacataggtatgctattagaaataaaattttaaagagtaaattaatttatctctttaaagattaaaaagtcaaatactaatttaattaattaaatttaatttaaaaacgaaatacattattaattttcaaaaataataaccaatcaaaatcaacatataagatttgatatctaaattttaattaatttgatttaattagaaaaatgaaatacattattaatttgcaaaaaagtaaccaattaaaatcaacaaattagatttgatatctaaattatcatattaattttttattaattattataattcacttctcatctttatatgattctatttttacaaaaaaataatatcatcattataaaaaaataattagagttttttcgcatatgcaacaattagaatttttaaaaacgaatataaactgttcaatacatgaaaaaatattataccgggtgaaaaatagatttaagaaaactttctactgagtaacgggtcataatttgaaatatttatatttaatttcatacatattatattgaaaatttataatcttatatactataataattaataacatattagatttttttatgtgtatgatgtgattcaatttttaatacaagctagaaaatcctagaattgacgggtttagatcgatattaatacaagatggtctactacaggtgaaactcttaaattaacaatcaaagtacaagtgtataatcttaaacactaaacaatatagataatatcaataaaacatatacaactcacagtttactatacatttaaaatcaaataaaataatatcatatatttttaaatcatctttacaataagtttttagtttaactaaaatataagcctacctgcggtatactacaggttaatatctagattatagggcttattggatctaaagacgggtcatcaaaaatttcctaaactgaagcaaaatatactgaatactcaaatatctatctgttaccaattataaacaaataagttcgtaaaacaatttaatattttatatacaaaatcaattaaatcttaatcacataaaaattagcacaaaaaaagtattcaacaattaaaaaattatcaaatctctgtgttatataagttttgatattatattcgaataaagtgtagtattccttttcaatttgtattatttaactaatttaagctaactaatatatttgctaatcttatacctatcaaaaccgactatcatttcttatctctatagtatttttgcaacacttttttggtggatttgggtaaaagtgcattcgggtcatatggtacattcccctattaaataaatatggtgtactcctatgttattagctaaaatatttaaattataattcagagtcatatcataagtaaaattaatattaataaaataaatggctttttggcaagacggatttggaatgacgggtttttgaatcaacattaataaaaaagtaaaatataattaatccactgtttcaatacaggttaaatctttaatttattattttttaagatcactaatattaaacatatcaaatcatcctaatttagaaaagattatataaaaccaaaaatgttatgtggtatgtataatgttactatatataaaattaaattataaaatataaatgtatgagagaatgatacaatttgcaaaacttttatatataaaaaagaattcttaaattttaaaaattactactttaaaaaacaaatcacaggacgggtaaataaattatagaacaggttttattttggaattgggttatatggtggatgtatttgaatcaatatttataaaattttaaattattattatgctgctgttttaataggggttacaacttcagttttttaacaattgtctcatggattcgtggtatagcgttacttaataacaattataaactgtaaaatataaatatttttaaaaaataaaaattgcaaatttaatatatattacttttaaaatcgtcctgcggtataccgcgggttaaaatctaatattattgtaatacgtctgacaaagattttaggtttcacataccttctcataaatatattctgtgtaaatgtattttatgacgagaaaatgtagaataaatttctttcaccggtcaagaaatttatatgaagagaataataaaacatagaaataaatagagaaaaaaaaagaaaaagaatgatgattgcataggaagaatcattttccacgacacgggaagcgagcaattgaccagagagagagagaagtgtcctttctggatttgattcattggtcaattaaagctgcttttgtctctcttctcttctgtcaggtttttatttttatttatatttttatacattatttcaatttcgctgttattattattattactcacgcatcaattgtgtatctcgatattcatcaataaatgtgaaaagaaatcttaaaaaaaaaattaagacccataatgtctcgttttcgctttatgttttagttaaatccagtcaaatctttaaccagcatttttatattcacaactcctcttttgctcaagagaatgttgtaaacttacaactgaaaactgtaatttgtttgttactctcccactgttataagaaatattattcttaagagtttcttttagcttttaatatttataatcagaagttaaacaaacattatttgacgaccagttatcaaaaaaactattagagacagctatatagtacaattactatgtatttaaatttgttagctataataatcatacataaaaaatactatgtttcataatctaatgtttagtacaattcaattaatttggttagaattgagaaatggtgatgcatatctctagttatttagaaaatttatattcggagcgaaatcgagctagattgtgaacagtataactagacctcataactagaataaatagataatgttgaaatatactttgaaacgaattagatgtgaaatgaaatgttccattgaagactttttattataagctacaaacttcacgtgaataatcttcaacatgtcagtcagacacacatgagacaacacaaaagtaccaccaaattcgtaattactccatggaagatggaacaaattcttcctttcatacatacacacaacatagggtacatagccaaagttactcatcatttattcttttttacagtccaacacttcatccaacgctgaaccgggtcagtcatcggcggttgaaggaacagttttcacctgaaacaaatagaacaaatcataagttaaatgagatccttgagatcttatatggaagaagaagaaagtgtttgtgaattgtgaccaagtcgcggaatttgagaatgtagaacatttcaagatatcgccgagtctcacgacgctccaatttcgatacgtatttccagaaaccatacacaccagctagtgtcatcaatctctccgagtatatcttccatgtgtacctacacaaaccatagcaagtttaaattaaacatgattaactaagaaacaatcaaccgttttgtcttaggttttttttgttacctttcgtatatcctttggagaccagcgtctgatactttcttccaatggtttggatcttccttacaacgttcaaagaaatcagccattatgttacccgcttgctcaggatggtatggatcgatgtggaaacccgagagcccgtgctcgatgatctctgctggaccaccgtgacaagtggcaaaagtcgggagcccgcaagtcatcgcttccactaccgtaagtccaaaagcctcgtagaacgcaggctaaatatatcatacaagaaatgtcactttaaatattaatcattcttttcatagctatatatatagcctaacagactaaaatataaaacactcatatcttttaactacataatgacattatattagcttaattttatatgaacaaatcaatgtttagattaagttcctaagttatccaaaccgaatcgaaccgaatcaaaaaaacgaaataaccaaaccaaaaaattgaattccaattacctgagcaaaagcacctcttgtatccgcgatgtagcggtaaagctcaccatttcgagctcggttagtctgagcagttatccaacgaaactgtccatcaagcttgtaattcttcataaggttatgcattttctcaatctctacgatttcttctctatctttggacttgttcacatcaatgttaccagctattacaaccagattaaccagctccctcaactttgtgttcttactatacatctcaactaaaccggagatgttcttcactttgtcgagcctcgccatagagaagagtattggctttgatcgatcactcagtgtaccgctgcaaaatataacccaacccaaaaaataaactgaaatgttgccaaaccaaaccggaaagtatttggtttcctggttatgaattcccaaaaccaattaagaaccgaagtgaaccatattgaataacagaatgccaataacttacacatgctcatcagtctggtcagggctatagagcatttcctctattgaaccatgtaaagctgtaagtctcctagtttcttcggaatacgggaaatatatggtcatgtctgcaccgggcgagactatgttgaacttcggatcaaacacatcgatgccgtgtactactctatatagtcccgggagcgtaaaagccccgtggctttcatattgaccgacggtgttcttcctgagcaaataatattagtattgcgtataagaacctgaaaattttgatataacaagtcacgtacgttcctgcgatttcttggtaagtgcttgtgatgatgaaatctgcgttgttcattgcgataagatcagctgtgaattgacaagagaaatgatacttgttgtcgaagtctttccagtaaatgtctgaatctggatacttggttttctccaaagcatgtgcaatagtacactgttcatatcaaagattcaaaaaatccaaatatgagatgttccataagcaaacacaacatacaacaacatctgaaaaacatgaaactcttacttgtgtaacacccattctatgtgccattaacgatgcaacaaggtttccgtcactatagttaccgatgataaagtccggtacgccttgcaattcaccgacaatctcgcttgctgcatcctgagcatagttctctagataaggccatacgtcgaatcttgaaatccacttacggaggattcctttctcagacctaaaaggaacccggagaatatgagtatgctctgttccgctgactctctctaaccgctggttacacgtagttcctttagcatccggtatcaacctagttaccttggaaaacaaggaagaaaaaagttgtagtctataaacacagtttcagatattgatattagtcattaagaacctgcaatgaccaaaacatgcttacaataagaatactaggtgatatatccaacccctgtctctttattctcaacagcatttcagtctcaagggcacggacttggtcaagaatatagacaacctgagacatcgaagaacttttaaatgataatcgaaatccgaaagacaaattaaacgtaggggtttagggagatacttgtccaccagtgtcaggtaagcctaaaacattggcttgcccgaaatatccatgtggagataagatcacaacgttgaaaaccattggtaccatcccaagaaacttctccaaggacgaaggatcaggagcttgaagaatatcagagagaagatgcatcatttcaagaactctccctgcggtatctccccatcctttctcaaaacccattccttgcaacgcgtattcgaattccgagaacggagtttcttgtgaaagcttagagatatgatcttctgctttactaagctggatttgaagcctagatatgctttgaatccgatcattcaacatcaacggctgcgaacaaagtgaaaaacttacaattttcagcagtttcataacatctttaattagcaactaaagaggttttataggaaacttacatgacctttgtacttatgaactctaaggaaatcaagcagaggctccaagcaatctttgttacggaacataacagaagacaagtgacgattcagaaactgaactccattaccaatcgaagacgaacgagaaggacgtggcacgtttgcgttaaagggctcgaaatcaagctcaagacaaaaagggtcactattaggtccatcaacgagttcttctttgaaacgaagatactcagagactgttaattgttcaacacttagctcgaagacattaacacgaacatattcccaaacaccaggtcttggtctaacggctaacgcaacaaaaggtggtacaactatagcttcctacaccaaaattaacaatctattattagtttcaagatgaattttgaagaagaggaaaagttttttttaccattgctgatttaaggatctctccaaaaggaccatcagagagactcttctttgtttcatcgtctccgataacagattcgagttcgtcaattaagttatgtggttgaagaatccctttcccctgatccacataccttcacaaaaccaataagaaactaaattaaaaagaaacgagctttgccgggagaaagaaacaggggaataaggatcttgacgacgaacctggagagaagagcaacgagttcgttgcggtgagcggaaagcgtgtcttgcacgcgatcccttgtgcttagaaccctagtgagcttagggtttgccatgaatattcagatgatcactaaaaccctagaatcctagtccgagaaaagtttggtttttcgaatcaccaacgattgctactaaaaggaaaaatcattgattaaaagggtaaaaagcagagtgattctggaattttaggcgacaaagagagagagagaaaagaagacgtgtttgatcttctctttttcttgatactgttttcgctacaagtgacgtgtttatgttagaggagagtacatgtgactctgagagtgtatgtattttattatataaatgaaagcagtcacagtttaaaggaaaagtaaagcagtggaggctccggtgtcgtctcttttgctctgctttgaaagcggtttcaacgagataatcagagcaagaagacaactggtgctctgctttctcgccacgtagtttctagagaaaaaaatgatttttgattttttgcatgatttcatgaaaaggaatgaataaccgatcaaataatatttttaattcctaaacagatgtgtgaatcaaaattttgatggatctcttctgagttacttttaatatgtttgggcctacgtgaaccttattgggcctctaatctatataaattacttttattgtatctaaagagaaaaaatcagaatatgttttggtcttttgggcctttttggtaagctgagcacaattgtgcattttagtaatttaggagattcgctcggatctacattgaattgttcggaagaaagaagaaggaattgtttggatctttgggaatgttaaaacaggctatttgggcccaatctagcccagtccaacacatcgaagcacacaagttgctaaattggtccgattagtcttagagcttgattggttctccctctgtcacccgcaaacgctgcgtttgcgggtggtagcagttgttagcgtttgacaccaatcataaaaaccgttagataccgctttggaccgctcgaaatcgccatattttaaaagttccttcccgcaagcgtttgcggttgcgggcggtagcggttaggttaatttttttttttaattaactaaaataattatgtcttccacccaaaccctatatatcttattcttatcagaaaatcctaatcaatatattgaaaccctattctctcaattatggcatctacccaaactaacgaaaatcaaaatcaaaatcaagaatcaaacgtaagtatgatctatcctttcatccattcattagctagtgtaattctctgagtattttatggcatcgtcattttatttattttgtatttttttgagttttttgattgaatacatgttttgatttgttttctcgattagaaaattatttggtcagacgagatgacccgtttcttgttagaactttatcatatgtatagaggcaatccggaaaacccacgagttcaacgttatttacagtttattacactacttgatgcaatttttggtgatgtaccaaatgcataaagtactaagctttttcttacaaaatttatttatttttgaatttaatgttttatttatggttttaattattaagcatgtttaatttttctaatattatcaatttatcataataatatattgtatttttttcttttactagtaatatattatatttattttggttattttttatttaattactatcgcacccgctggtttaccaatcataaaactcccgcaaacgcactcattatcaaacgctcaaccagtcgttcaaaacacttgataacgcttgaaaccgcaaccgcctgtttccgcaaactcccgcaaccgcaaccgcatccgctgcgtttaaaccagtcaggcccttatttgttagagacatccgaacttttaaaagttaaaactgatatgcttgtccatccataatgttagaaccgtctttggaattggtaatccacacactataatgcgactcacgtcgggacaataacactattgtctaccgtgcatacacgttgttcttatttcaagttttgtttggttttactattacaagttgctcgttttcttattagttaatgtacactaaaccaaataatttaattagaaaattaaccttctttttcaacgcaattaatctataaaacccaatagttagttttcaaaaaacttcacttgcttaagcaacatataaacaaagcaagcaaaaaaaaaaaatggctttctcacgcctctcatttgcagcttctctcatcgtcttctcatctctaatcatatcttcagttgcttattacggcaatgaagctgacccggagaccggaaaattgattcccatcgccgttgaagggatcatcaagtgcaagtccggtggcaaaacttacccaattcaaggtaacataacttctttaattatatataccaagacgaattggtctaatggtaggagaaaattagagcatagtaaggtctaaccaaacgaatatcgtattgttgtttgtttgcgacaggtgcaacggcaagaattgcgtgtgtgaaggtcgatgcatatgggaatgagttagttccaatatcgatattgagcagcaaaactgatgctaaaggttacttcatcgccacgatattcccttcgcagcttcgtgcaggaaggacagtgaccaaatgcaaaacttacctttacaaatctccactcgctgattgcgattttccgaccgatgtgaacaaaggtgttagaggacagccattgagcacgtaccgtattcttcaagacaagagcttcaagctttactgggctggtcctttcttctacacgtctgaacctacttactactaattatgatcttctgatgaacatgaaatttaacatgttcttggagaatcatttttcgtttgtttgattattcgtcgtataacgttgtctgcaaaatgatctaagagtttgttttctttatcttatatttcatgttgcatatatgactttgtcatgtatcttatgttttaatattttcttggtaaatgtatgggtttattggatttgttctaatcatctaactgcttattttgactatgcataatggtgatcgtacttaattgtgttgaagctcatggaggcatcggtattaatatttagttaactaccataaaatgttacacaagttttagtttcaaaatatcataaatttggaaaaatatttatttttttatttcttaaacaagttttttttggcatccgaaatttattataataaaaaaaaagatgaaactaagcctgcaaaatgttgaaatccctagagacaataatcctaaagagaaacacttttggaaaaaaacctaaaaatacaaaccaaaacattaaagctaagtttttatcaattaaatcttaatcatatttaccagttatttcccaagatcagaaattgtcttcatgtcgatggaaaccacaaacctaaatttacaatccaattttttaaaaatcaaaatggcaaaatcagaggtatttttcgaattttattggtcataagaaatggtatttttgagaaccgccataattttaattggataatttcacttttagattggaaaaatcgttggtgtttgcctctctacttaggccaagatatattaagctataaataacctgatttctagatttactttggttttgtccaaattttttgttttttaaaaaagaatcaagaaaacaaaaacaaaataaaccgtgtttgggaaatgcattcaatttttttttttctatgtgcaagtatatgttttacaggagtatctacatattacatcgtatgttcatcccactcttttggtctttatatacaatgaccttgatttattgaacataacacatctaaaagaatttgactctctttttcttttgtttttcaaaacaaagtgatatatattttcaagaatattataagagctctctacctctacatggagcaaccagactctcttcttcagtacgcttatttttccagtgaacatgacaaaacttcaaggccaagaacgtgagtcctttggctttaacactcaagaacttgagcattctctgttgatcttggccagctacaaccactggaccatcccaacacacccaagactaaatccaccttagcgcaaacactaacctgtgagttacagatccatagagacacgggttagtgtttagtgatcgaagatccaaaaagaacaaaaacaagagttaaaagagagtttagatcaacaggacatattaccaaactttcaatgtttgcttctatttgaaataacattactgctaatcctcttcctctgtcaatctcggcctgcaataaaccataagttttgtaagatgagtagttaggaactataaaatgtttttagaagcaaggtttaaagtaaaaccacgaaccacgcaagaacataatgcaatgccttcagctgcgaggactgttgtaacctctgcgattatgcctgccaaatgtaacaaagagttcatatttactttgtaagttgttggaatcatcaatcatgactaaacaaaacgaatatacccatacctttgcgatccatggatactacacataaccattcgatggactgaccttcgagatgatgccatgtggcaattttactgtctcgccaactgtctaagccgggcaacacttccttataagcagggatattagcaggtaaaatcctggcaattccatctccaggtaggaggaactctggctcatcagaactcgagttctttatggctttgttgtgttttccattcacctttggggcccaaacgcttccgttttgaggagcgggtgttgtatctctacttttgtcttgtgactggaattgcttaacattgacgaggattttctcccaccattgtaggctctttcttgaatcttctgtgagatcttccacatcactatcagagtccgccacaaagtcattcacttgatcctgggtaatttcggcagcacattgtgcagcttgctcccttaggaactggaacaagatgagagacatgaattagtaaatagtgagccaattagcatgaagtaaagaattaaaaataacataccctcataatcttgtgtcttgcactccttgttttggcatgttgcaaccactgtttatgtctttggaaagcagatttacttgagagggcctgtgatgtgacaataataataaaacatgagagcccgtggaacatgatgaaggcaatcaaaattttcctaagcaggacaagaagaaaagggagaaatttaaaacaaaagcaagggaaaaaggtacaaacgttgtaggtgactatctccacgacctcagcattctcaagaacgtgagttggggaaacaagattaccattgacctgcagtttcaagccattaagtatcattaaagtctggtccaattgttgtctctatttcaaagataacaaatcgagaatcaaagttatcatggaaagaacgacataactagggaaaatacctttgctgctaccatcttgtttccgatttcggtgtgaatcagataagcgtagtcaacaacggtggcccctttcgggaggttctttatctgcaaatagaacaccaaagcatttaatcaaaaacataaaaatgttagatgatggttaaagaggctttgaggtatagtagtccttacctctcctttaggtgtgaatacaaacacacgactacctaaaagatccctcgtaatggtatccacaaattctctagagctcatgttacccacaaactcctcttgccattcccttattgcatttagccacccaacctggaaaaataaactgtcataactaaaatcacactgggaaggtaaaaaggaacacattacgcctacatctagcacgtctctctgcttttttaattctgaatatggtcagtaaataccctgagtgcaaaatctgcattgttgaggcaacccgtcttcccccttgaatttctacctaaaggaaccgcgtttccaactaatccagtagatagagacttgccattgtagtaaacagcaatgcccctttcagcaatcaagtccatctcctcggttctgatctgcagagaaaaatgtagtcttaataaccaatcaaatcagccttttaaatattccccatgcttgaacctttaaaatactaaaaccgaattcaattgtactaatcatcggcgtttttctaagaactgtgataaaagatttttatctcaaatacctgaacctccagtcgaaacatactctcatacaagaatggaatcacagtagtatggaggctctggtatccattgggcttcggggttgcaatgtaatcttttacctgtaagacatatgttcagtcccaatgtagataagatataacctgaataacaaaagatctgatacatactgttcgtggaataggtttccagatctcatgaacaagccccagaacgtgatagcatatctgcattgacgacagagcgagaaagctaagtgacacacaagaacgaatcggaacaaaatatacccatttccttttcattgggatttcacctgttgtggactgcacaaaggcccgacccctacagatggttttggctttacaacaatccgtaactgctaaaataatgaaattaggagaggcagcgtgttaacaatcatataagcttcagatggaagttttgtattcaaaacctttgatacaacttggagacaagagtataacacaaacctgagcaatctggttgtaatcattaattgatcctttcgatttgagagcagctttgtagatgctgcagataaaaaaagagacttcagatgctgaagaaaagggtaggttacaaggtaaaatgaagaagtcacttatgaattcacctgtaagtttccttgcaaacagatcgaacatcagtattcacagtcacaaggtccagaaactgatcatcttcaatctttttcaccaaaattctgtttgcctaagatacatagtaggactctgtgaatgcagatgaactaaataaacgcccagatgaattcagagttcgaaaggtcaaagaggtgtaggtcgctaatcaacattcttctctaatatccttttgtttttcaatctatgttttggcattttaagctcagagacgataatagttgaaattacctcagtgagttctttttcatgctctttgtagaggttagcaatcctgctagtgactctatcataatcctcagcacttacgtacatgaaagacagattttccagttcagactgcaagattaccaccacaaaactcagaacgccattggacacaacgattgaaataattcagtttcacatgcacactaacatacatttcgactgatgtaaccggaaataatggccacctagttaatatttccataagaattatagcaagcaaaaataatacttaaagggttatacctttattgaatacattcccaataattttgctaaaggagcaaagacctgcaaagtctcccctgcaatgctggactggacgaaactcacaaattcattagttatcccaaatgaaacatagagctggagctatgggcaacaaatctcaactacttgaaagaatcacctgcttatggggaggcatgtggcagagagttcgcatattatgcaaccggtcagctagtttgacaataatgacgcggacctggattgaagcagttagacatgctgataaatatataaccacaccagctaatacaaaatcttaaaagactgaaacctcgtctgtcatcgccagaaacatctgccgcaaatcatctgcttttacatcttgtattgtttcactttccgttttacactttaactttcccagttttgacacctaatagggaaaaaaacttttataaataatgaacttcatcgcacaggaagcgtggagttctttccctataataggataggaaaaatattgtagcaaacacagataggcagaccttggtctccccttctacgatgtgacgcacagttgcaccaaactcttcttctatcttttcaaaagtaatgaaatttgtatcctcgactgtgtcatgtagtaatccagcaacaatagactcccaatccaattcctatacaagtacaaaagtaattattaagctttccaactaatcctcatgtgaatccatattcacaacgtatcacgcaactcacaagttccccaaggatacgagcaactgcaacgggatgtataatgaatggttccccactacgtctcttttgaccatgatgtgcctcaaacgctaactgcacaaacctttcttactgaattaagcaatgaatagcaaaaaactgaagataaacttcaataataagttaataacatatcaaaggggaaatgacataggaggatgtagcttaaagacgcctttcaaatatagagaaatttatatcatcataccttaaggcccttttgaacaaattctaattctttacggggtagataagatattgatgggaaaaggtcctgcagagataaacacccatcaaattggttgagaatgtcgagctagtagagttccaaagaaaaagaagagaccagtgtatcgtacctcccacaatgtttcgacggtaacatcactggatgcaccagaagaagattcagctgatacgcaatacagttcccatcttttatgaccaccacaagataatctggacttcaagatatttctcacatttacaaagtaaggagcctcagaaaagcctacttcatattcatacctctgccaggcgcactacattatccaaaggagttaccataagaatagattgcaaatactgccaccatggcaatatgaacaaggtgatcatgtacaaaaatagtagaaacacaattctggagcttgatatatccattcaagccacatattaatatcttaacaccggactacataaacagacgcaataaaggatacttacagctttcattctgctctttcttccatttctgccacatgaatacacagaacacacaggtggatgagcagtgctagctagaaacccagttaacgctcttggagctttccaagcacaggagagagcactgcaatcgcttcttgcattcccatctcctttcgttagattacatatgttcacacattccacagacactgcattgtacacacataatcaatttcaataaaaccaaaacagaaccaaccaaaaagggtaaacgtatatgcatgaattcaaaagaaattaattgttaaccagtaatagaaaactgtggtccacaacaagaatggtaggaagtgtttagttggcacatgaacttgcttaaagaagaactagtgaataacctaatcagctcagaattctaactttgctgcatttactcactgatccaacaaacaccagaaagtaatagaaattatcaaccaagtggattttcattttccgtcgcacacatacacaaaacaagaacaataactaaagtagctttcaaattcaatgggacgtgaactctctctctctctctctctctctctctctctctcggaatccaattcagaaaacgaagcaattggattcttaatacgactcataactaagaaaaatcacacagtcttaagggtatattagcttaagacgttaagacgcaatacacaattgctactgaattcaaacaaacagagagaagaacagaagaatcgtcacaaagcttcccctaaactctgcctttgaaacgaacatgaaaaaaaaaaaaaaatcagagagacgaacgaagaaaacgcaccggacatggaagaagcagaagtcattgctaatgaggtaaagcaatctcactaaatcgatccaccatttgattgatacgaacaagaaattcaaaacctccagattccgaaatcacagagacggagattaagaactctttacgaagaagagacgagttcaaattcggatagagaggatttcgaaatgatagaatagagagatagagagacgcacacagtgatgtgaagaagaagaagcagaggaagaagaggaagaagaagaagaagagagacagatatggagtctcaggtagccctccctggccacacaaataccgtccgatataccaaagaaagaaaaaactttgagatatttttttccctttgtggtcaaacattaaaattatatattctcttctttttctgttaaaatacttttttttagtcaatagtttttagggtttacaaaaaaaaaaaaaaaaaaaaaaaaaaagtcaatagtttttagtatttaggaattatattgaatgaccaaaattatatggatgcttgtaaatatttaattaatttacaattttcatttgtaataagatagtaatttagaattattaatttcattttcttaaatgataaaatgtccacacaaaaaaaggataatttcatatttttattttattttattgtgtatataatataagaagggaaaagaaaatacatttgtgaccaaaaggaaaataatatacatttgtattttattatttcattggttattattaggtgaatataaacaagaaaatatgcatattggttgtatatactttatatataatttaataagctcattcaaaaattcccaaaaacaagtatttcaaatatcgttacaatttacccccgggacaaatcaacgagccatttaaaaaaaaattataacaatgtgaacaaatataaaataattaatgggcaataactttaaatttagggagttaaaatagtgttaatgagaagagcatccttgcaaagcttcaacaagtttgtgttcctacgagcaagctcagcatcattaccggcacgatcgttcaaagcgttttcacaagcctcaccgtcgcttatcgcggtgttgagccaaatatcgacgtcgatgaacgagttttgcatcaaagcggctagagaatcgtcgagctgcgcgaccgcatctaagtaattcttagagcaatcgtcgagggtgtcttctaaagccggctcgaggttcttttgctttagtttggctttgatgtagaaagatgtgtccgaagcatttgaggacgcgatgcttaacgcgatcacgcctagttttggtgcggttgcggttgctgcctcaggacgggacgttaggcttgcaacgcaaaacgctttgtcttcggatttctcgcagagtttctccgctaggctttgcctttctcggtgaatgttggcggtggagctttaccggcgatggccaccgtgacgtagacggagaggaaaaggagaaagatccttccggccattttcatcgttactattttttctttctcaacttctcttctcgtggttattaattgttacaaacaaattgaaaattggttatttaaagagctttgagaaatgtatttttgggttgattctattttttatccaactcttcttttacatctgttattctatttttaagttcttttcttcctctttcattctatttttaggttattcctagtttttgccatgtttcttaatttggtgggttcggagagaattgtgtgatacgagaaaaaggtcaacgcacatttgtacatagtcaatgatgggcctaccatggttttattttgggatgtgtagttttgatctaaatcacaatgggtaaaaatactaaaaattgttgtatgtttgggtctaaaataattatatattttagtctaaataatttattattttatggatgattttttggatgttgtgatatgaagctttttgatggttcatccatgaacaatcataatggtgaatttgattgcaattgcgctggggcttgcaaagactatgtattgttagaccatctacattggtaatctctcaagagagtttttcactattaaaataacagaaataataaaaagagaagagagagtgtagaaagtttctcaagtgagaaactatgagatactctctacaagccatcattacatttctcttcttttaattgattcaatttttacactaaaataaaaatttaatcatataataaaattataataaaatactaatatttttcttgttcgagaaactttttgggtttctccttgatggagatactcttaggttttgttaaactctacaacacatcaagcttaaacctttgccatccacaccaactcacggaaacagagtaagcaagatataaagaagtagaggaaataacagagcagaataggaagaagaggagcacacaagtatttgttcacaacgaaggagaaagagggtgattacaggataatactagtgaacgtctaaaacttttctctagctaaagactcactctccatcatgtactacttgaaaaactaccccaaagcatatacagttatactttacagtttctctcaccccttatgatctaatctccttagatctacattgcttgttctttctctgctccctagtgcagcttccagacgttccttttgaatttacaaacggacaaattctccttattggccaacaatgcagaggctatagttatcgttgcctttaccttgtatactagaaaatgtgaacatcaagttctcatcttcatatgtacagtccgttttctgcattcgagtaagcttgttggaggagtgttcttcagcttttgggtgatttgtcatctttatctgtttgctaaaggattgattgtgtttgtggtcgattattgtgtctctgctttgggtgtatgataatcctccttctggtaaacaagactacgcagtttcagtttccttgatttaggggttttctttgtttgtggtacaagccttgtttgtacgaactcagagctaatctccatctccttgtatcagctgattcagacaagacggatactaagttgcaagtttcttagatgcaagagttatataatttgactttgcagcttgtatcaacttatagcaattgaaacagtcttgtcaccatcaatgtttttagattataatttgtttcatgcaagtttttgtgaaagatttttatggaagttcatatatatatgaatactactgaaaaaaaaatcaacttaaaattcaaagcaaaatctccacaaatagatctgtttcattatagaaatacttaaaaaaacaagaaaaaaaacgtggcagaaggaatttagaagcaaaaacagcttcaatctctctctgatccgcttgctacttcacaattgactgactcttaaggaagcttcaatgttttttcttttagacagatttgttagcagagaagtcttgagttgtcagaaaaacaataactgttagaattgttgtggagaggtggcagagaagatgtgtgaagcagactgctcggatcatagcttgaaaacatgtcttgagagaagctagtgttaccgacagcattaccataagtgttctggttgaaaccagaagagaattcatgtggaaccgtgtttgagagattaggatattgtagaacgttgtttttgttgatgatttcactcatcatacacatgttctgatcaaaaccatgaagctgatcctgtcgctgcatcaagtgattattcaacccgtagttattcactgcagatgcttgtaccgaaagaaacggtgagtattcttgtgtgtttgacacgccaggatgttgaaagttgttgttgttggtgatgttgtccaaacacatgttctgaccaaaaccatgccgcatcaagtgattcaggtaattggagttgattggagagtgaagcagacagtgggagttgtgagagagtagcagcatctccatggttgtacatatacggcgagaagttgctaggattcaagtgttggatctggttcagatacgatggtgttaaactctgatgcaccaagtttttgttttgttgtttctgcgactcaacaatacgaagcctttcttgcagagtagaaagagtccgttctaaggaatgaatcaattgagagagttgttgaggagagtaatgatcaaagtcaggataccaattcttcacataattcttctttttcgaattcgtcttccccttgtcatttgtctttgtctttgtccttgtccttctccttctcgatgaagtcatgaagattgagactcttcttgcgttttgtggcctctttatatctcgaagccatgtctttcactgtatttctctccttaggccatgttctcagttcaccgtctggtccgtaatagatgacgcaaacgtcaatagcacagagaatcgaaagctcttcagcttttttgaagatggttttgagtctgtttgttaaactagttgaattacgtgacgaagaagaagaagaaaaagaagattgcttcatcgtgattttgccttgattcggcaagaaactagggttttttcttccgagagagagagaacacacaaagaagaaaaattatggaaatgagggtgaaacattgtgaactcaatacgtttctatagatgccttgatgcctacggaacaacgtgtacgcatctgtgttaaattcaaaactaggcctataatgggcttagcagaaagcccaattagaaaacgattggtttttgtggaagagtaaccctagaaaatatcatatataaagatattgtcttcttcgattaactcttcttcgccaaaatcagggagaggctaaaatggtttcgttgaagctccagaagcgtctcgcatcctcagtactcaagtgcgggaagagaaaagtatggctcgacccgaacgaaggaagtgatatctccatggccaattcgcgtacgttgttcttcatactctcaaatgttgttgatcagatttaactttctcggtctcgtgcttgttttggtctgcgatcgaagcttgttgataatgatagtagaaaaaaaggatactgtagcttacttcgtaggtgacgttgaatgatttgaattcagtctgatgaagttgagcttggaaatggtgttgctatgaatctgatttttgaaattctgtaaaattttgtttagtttggacttgttcagatgttatcgtaggtttagtagctttggattgactatgttcttctcggattcatggtctatggtttctgattgttaccaaatcaacatgccatcatagcactctgttggatcatgattcttgtttgttttctatacgaaatggtgatgcatctatgtgcatttgagatttgagtgtaattctgattaagtattttggattgttatggaacttcaggtcaaaacatcaggaagcttgtgaaggatggattcatcatcaggaagccaacgaagatccactcacgatccagggcacgtcaattgaatatagccaagagaaagggacgtcactctggttatggtatgtgacatgtaacatttgatccacattcttgaaacatctccacagatgatttatgtggctgttgtataatggttaaggtaagaggaagggtacccgagaggcaaggttgccaacaaaagttttgtggatgaggaggatgagagtgctgaggcgtctgttgaagaagtatagggagaccaagaagattgacagacatatgtaccatgacatgtacatgaaagtcaagggaaacgtcttcaagaacaagcgtgtgttgatggaaagtattcacaaatccaaggctgagaaggctagagagaagacattgtctgaccagtttgaggctaagagggctaagaacaaggctagccgagagaggaaacatgctcgacgagaggagcgtcttgccaagggtcctggaggagacatacctgccgctgcaccacctgcacaaaccgctgagtaagttttcatctctatcgtatgtgaaacaaaattgttaatgtgttgtgtggcaacattctaaacttgctgttaaatttgcagggtacctgcgaaaaagtctaagaagtgagaagcttgctcggtagtgaattctcttataagcagtgattttgaatggtttatgtgatatagctttgtgaaaactctttatttgtcacaaatatgagaacctttgtcagtagttcgtactgtttcaggagacttaattctatcttcaagtccttttctctctcgaccatcttagtaatacactatctataatttttagcacataattatggttaagattcgatcataagcgaattagaagagaaatcaaacagctttatccataaaagtcaataatatagtatgagtcaaaatcataataggaatatagtatgtttgttctagtaaatcacaagatataagatcttgtatataaagtttactatggacacaacaaaatctttaaacaaaccaagtaacatacccaagtttacaaatatatttaagtccggtacgatccggttaagaacaaaactttggaggcaacagccaggaaggaaatagaggatcctaagttgtctgactgtatagttgaacccagacaaactcttccttgtaacttaagctcgagtcacacgagttctcacaagtgtacaccacgattgttgcccaatcgagagattccctctcgttcttcccaccgaagaagaacagtagctgcggcatcacctgataaaaccgccatcgaaatgatcaagaacagagccaagcttccaatatgcaagaacagagaaatgaaatggggaaaattgtgtgttttattggtttaaagttgatttgattcagctaaaattgttggccaattcttgactggtttataaaataagcaaaagaagtgactaagaccaagctaatacaagtttataaagaagagaagaaagaattacctgaaattcaaaacaacgaggaccaccacaagatttgcaactgggaagctcagatttagagactcgtccgcttgctattggccaaaggggtttagcaccagagctccgggaatatctgtatcaatacgtatttcacaaatcgatgttatgggagaatcaagatcaaaagtatgcagaaaatcataagcgtttgaatcacacctcagaacttgttcaggggctttgtctacgcgttgctggaaattaacccaattctttttatcagcatctccctgtacaagcatggaaaatgagaatcatttgaggccttttgaagtttgcaaaaatggccatgacaagtgaactgtttacctcaaaatcgttcattagcgatttcatttggtcgtcaacttctctctttgagaccaaaggtttagctacttcatcatctcctgacatctcagtatcatactcactttcatcctcattgatcaatacaaattctttccataaactcttactcgcaactgcacaaaccgaaaaattcatatcactagttatacaaagtttcagggctaggaaaagtttgtgaattcagctaacctttctgcttttcagttggagcaaccccattattgacagggcctgagtcagatgtttcgctaaccgttcgaagctgttggcattcggttttatgacccaagcgccaatgcagggcctggaaattagaaacaacacagattgttcaaatttgctcaaaagagcagaatctagcggaacaaaagaaactacgatgcacatatgcacacacctggtgtttcggtgaacagtatcgagcatttttgcagccgctacatagtttatctcctttccatgttccacaccaagtgcaaagcggagctaaagtgaaacaaacaatatcaagaattgacaattaaaagagaattctcggcattcagtcaaacccatcaatcagttcataatacctccatgacccaatggcttgtctgttccatcgtgctttggagcctcactcgagtaaaaaggattagctcgaggcaattggcaacggaaaaccttcgtacttcaggaacaaaaaaaacagtactttagtgtaacaacccacttggagaggagacaaacaatacaaagatgcaatatatagtaagaggtttctttctacctccgcatagccttctctggggcacgtttccattgttcatgttgatcacgaaggagacaagacatagatggacacatgaagagaaacaatgtccgatgaaaagctgattccttgtctgttaaaggagcataaagctgccaaatttccacaacaaatttcataaataaaccgacaaaaaacatgcaagaaacaacaaaatagtttgtatgaaacttacttgaagtacaaattgcataggttcttcacatagatcacatagaattgacttccctgatggtaaattaactggatccaaccatgcctatattgacaaatatcaacccaaagaatcaatacctaagaacataaagaagaaacagtttttgattgcacaaattgaaagatgttttaacttagtaccggaacaccaccagctaaattagggaacagttgacgaagatttgaccatgcgaatttaggactctcaacgaaacctaacatcacaggttcataatcttcatcatcttcctcatcatcatcatcaaattcatccatatttataggttccaccgcagtttcatcatcgtcatcatcatcaagctgagttattcggaggcctttgaaatcatccatggagtctccgttgaagctactcatcgaatcttctgtgttgaatttgatgaaatgaagactgcataacagagcaaaggaattgaattctagggttttactctgtttcataaacctctcaaaagtatttggcaagaaacaacgcacaaatcataatctgttaatgggtctttcgcaaaatactaaactcactaatttttcaagatttagagctcaatactcagctaattacaaatcccagaattggtacgaacaaatgttaaaaatgagctcactagtcagtatcaacaagaatcaaaatccaaaagaaacttacaacaccaggcgatgatggagatgttcttcagatagcctttaaaggtcgaatcttcttctatcaatttaaacagcaaaattttgtaaacatctttcacgaagacgaagacgaagacgacgacgacgacgacgacgaaaggaaaacaaacgtcactctggcccaaaaacaaaccctagaatagacgatgtcgtttaacataggcctataatagactaagcccaataaagtaatataagcccataaaggtttctaaattggttacgaataaaagtataaccttatcccggacaaccttatccttaaaatctcaccggtactccaactcccgttcaccggagctctgactctctgtaagcgaagattctctgctctttagctaatttagtcgaatctctattatgggtctgatccagtttcttacgagaatctgatttctgattttataacttgatttctcgatttcaaatttgtgttcttgcaatcgatttttttgcaggtaaagaagaagggagaaatagataatgagcagtagaaacggcaatgagagattaagaacagtgtggacacctgaaatggatcagtatttcatcgagcttatggtggaacaagttagaaaaggcaacagatttgaagatcatttgtttagtaaacgagcttggaagttcatgtcttgttccttcactgccaagttcaagtttctttatggcaaagatgttttgaaaaacaggcataagacattgaggaacttgtttaaatctgtgaataatcttttgatagaagatggttttagttgggatgatactagacagatggttgttgctgataactgcgtttgggatgagtatcttaaggtgcgttttgcgttttgtttacttgtgattttgtgtcttcttctcagggattgatttgtttttgcttttgggttattgaagattcatcctgattcgagatcttttcggataaagtctataccttgttacaaagatctgtgcttggtttactcagatggaatgtctgagcacaaaggtacaatctttaatctattgattgttacttgaatccttcattgtacattcttgtcaccaaagatcaaagattcttaagtaacctgtgaatgaatatgtatgtttcagctgaggagagtattagtgagggagaatccaagacactgattcaggaagatgatgggtacaacagaatatgtgaatcgtcaacagtcaggtctaactcaaaaggaagcagtgtcacacggtgcaggactacttggcatcctccaatggaccggtatttcattgatctgatgttggaccaagcgaggagaggaaaccagattgaaggtgttttcaggaaacaagcatggactgagatggttaatctcttcaatgcgaaatttgagtctaactttgatgttgatgtgttgaagaaccggtataagtctctgagaagacagttcaacgcgatcaagagtattcttcgatcagatgggtttgcttgggataatgagcgtcaaatggttacagctgataataatgtatggcaagactatataaaggtaacttaatcgctctgatctatgctgtgtggttagttacagtgttttcgtctctgttttgatgtgtgttcttgtctgaattaatcacaggctcatagagatgcaaggcaatttatgactcggccaattccgtactataaagatctgtgtgtgctctgtggcgattctgggatcgaagaaaacgaatgctttgtagctatggattggtttgaccctgaaactgaattccaagaatttaagtccagtggtactacagatttgtctatttcagctgaggaagaagatagcaactctcttttgtttgaccccaagaacaaaagagatcaacttgctaatactgatacaagccctataaacccgaaaaagcctcgagttgatgaaacccaaaccatgtcaatagaggacacggttgaggctattcaagcgttaccagacatggacgatgaacttatattggatgcttgtgatctgcttgaagataaactcaaggcgaaaactttcttggctctagatgtgaaactacgcaagaagtggttgttaaggaaactccgacctcaagtgacttgaggattatgagctgtaaagaagcaaagtagaagtttgacgataaacagaagctcattggcttatactacagagtacagactactttgcgagagtttcatatacaaagacttatgctcttagaagttgtaaatgtgatcaaatatggctgatgatattaaaccttgtacaaactctctcttctttgccttctctagtagctctgtatctgacaagggagacggcgattcccagtctctgagcacacagaaatacgaaatgtatctttagacaaggtttaagaagatgagataaagcaagcagaatcaagaaaatgtcaaagaattacttacttttctgttgaatcccttattaagctattgtcttccatgcttgcttcactagatgaatcaggttgtacaagcttggacttctttggtgacggcggattgtatataaatgataataatgggtccagaacacttttagatgtatgattagtagacaacggctcatcgattagagactgtaagtatttcctagtccctggagaaaatgctgaatatgactcatccttgtaaagtctctgcttttgttcaaggtaagtattcgtcaaggaacacaaatgtcagataaccgatataaaacataccaagatatagaataagcacaaaaagacttacaagttttctactaaatggtaacgaaagcaagaagagtaaataaaaaaggataccttgaagacatctctatgctgagtggtaatgtgatcaaccatatgcatcttcactcgtctgctacaaaccggacatatctacatcacaaccaaagctgaatttgtgagaagttattacattcatcatcaccaaaagactgttttcatttctcacaccaaacacttcacaactacaaaatggttcctcatagcatcaagcaaataatccaagtgaactaaaatccaagaagtccctaccaactctccttacagaatcacaatcctgcctactaaagtaaccattagagtacaacaatgaacatcacacgataaatagtctaaatttacaactaactgcttcatgtaaaaactcaaatgtatagtttaaagaacagtaactgatttgggagatggatacgagttgcaattaccccattgttggcgtctagttgatgctcctcatcgatatggtgacacaattcaactaaatcataatcatctgagcaaaacgggcatggataatccactgccatttcatcatcatcttcaaactcaatacatgaacctaaacaaaaatttcaccatcacaaaacttttatcaattacataacataaagtttacccataaagtgacaaaatttaaactcactagaccttaagggccaaaagaattgaaatttgataaagaaattaaaaccacctgcatataaagcataaaccctaaaacaaagctaaatgcaattgggaaaaagaatggatctttacactaacccgactgatacttggcaagttcttctaatcgatatttcttcgacgaatcaaacccacaaatgcccaacaaatcttcttccattttgattctgaatccacacgaacttgaattgaaaaatctcagataataattaaaggagcatattcttcctccgtgtatttattagcatctgtcagtactttgttcagcctgaaagtgcgaggaaacacaccaaaaaggcaagacctttaaatgtggtctttttctctggcgacatgagggaatccatggacacgaatctattgagctaaatccaatgaccaaactacccctaaccggtcactatagcctcttttaccctgaaccaccaacgtccctctgttgacttttagccgccacgaatctacgggcattttcgtctttgcgccaccgtcttaaaacgtgtgctccacacacttatattgaccctatcgcgcaagtggactataagcccaatatataaatgggcctaaaaaggcccaaatacttctccttcgttgctaagtctgtaacacgcgctaatgagaaacgattttgcgattcagattcgtttgcttttgccgacgacaaaagctccgattttgtttattttctccgggaaattttactttcgagattctgttgagaatcaattgatttggtattgatggcgacgaggaatcgaacgacggtgtaccggaaacacagggatgcgtgtaagagcgcgcgtgctccattatctttatcggcgtctgattcgttcggtggtccggtgatcgaaatggttagcggttcattttcccggtccaatcactcctcttatgctcctttgaattcctatgatcctggtccatcaaggtaataatataatgtgttgtttgattctgcaaaacctgggaaattctatgaacttatatatagaaacgaattgtaatcatgggattgatttgagatacagaattagaaccctaaacgaattaggtaacagaatgagcaaatgatttaagtgttgttgtgaatgtttgcagtagtgatgccttcacaattggtatgccaccagcttgggttgatgattctgaggagataacttttaatatacaaaaggtgcgagacaaaatgaatgaactagcaaaggcacattcaaaggctcttatgcctacatttggagataacaaagggattcatcgtgaagtcgagatgctcactcatgagatcacagatttgttgaggaagtcagaaaagagattgcagatgttatctactagagggccttctgaagaatcaaatctcaggaaaaatgtgcaggtaggttgttggacactttttcagaatcgagcttgttaacaataaagaatgcatggtcattaccttttcttttgtgcttttagagaagaaagttaggaattttgggttaaatcactctcatatgttttgactacctatctagttgacattatcagtcagcaaaatgtatgaagtgtttttttttccctctatataatgtactttgggttattctatgttttgagtttgtagcatgaggataaagttctgtgtacatgtatagtggggctctccaatggacttgacctactttttggcatactgcttttgacagcgttctcttgcaacagatcttcagaacctttccatggagctccgcagaaaacagtctacttacttaaaacgtctgcagcagcagaaagaggtatgtttcctttattttcaagaaataaacaaaaaaagtgttgattcttgagacatgcatgtaccgtaatatgatgttcttatttgtatttggcttctctaatcatagggtcaggatgaagtagatttagagtttaatgtgaatggaaagatgtcgagactggatgaagaggatgaacttggtgggatggtaagtgcttacttgtattgtaaaactatatatcattgacaaattaataaggacttaatatggttatctagctagagcaattcagatttttaatcagttatccttgtcttccttacatttttaagaaacacttcttatggttatcatgctaggacgagtcagattttttttaatcaatcttcagaaccttgtcgtccttactctgccaataccataatgagaatcgctggtcttcaataaattgtagggtttcgatgaacaccagacaatcaagttgaaggaagggcaacatgtctcagcggaaagggaacgagagatacaacaggtaatggaagttgttactcgaccatatttaagaagctgcgtgcttcacattttcgatggcgattaacttcagagttctgtctaggttctgggttccgtgaatgaccttgcacagataatgaaagacttatcagcccttgtgattgaccaggtgcctagcttagtcattaaaaggcttatgaattacataactggctagatacaaagtttttgctggcttctcaacaattagttttcttatattcttgtatcaattagggcacgattgttgatcggatagactacaatgtccaaaacgtttctacatcggtcgaggaaggctataaacaactacaaaaggtttgattctttacccaaaactcataagattttgtgagtactacagatttttcaccgtatggaactcacaaagacatttcaatttttaaataggcggagagaacacaaagagaaggagcaatggtgaaatgtgcaactatactccttgtactctgtttgatcatgattgttcttttaattcttaagaatattttgttttagtcatatgccaacaatttagaatgaaaaacagcttgtcttgtttgtaacaaacagtaaccctctcttttttctagttgaattctcttttccaatcgttttaccaaatctgtagaagtattttgtgtaaaccgtaaatggttaaaatcactatagttaagaaataaactgacactaaactacctagtgggaaaatgtgataatcactacaagaatcactagtcctccaaattcaataacacatgaaggaaatcaagtaatcaactcataatgaaaaattgaaaatgatctttttgtgcaagggagaaaaaaataaaacaaaaacgaatgcgttggcttcacacactttagattagcaaacctagacatataaactcatagagaaactcgtgacaagttgttttgaggctcatgttaaacaaaattttgtgacactcgtgcaagacgatgatcgtcctcttgaactagaacaatgagccgagagtactcctctcagtgctatgcaaacacaagctctttgggtaactagggttacctctttttgtttttttattgattttcttaaaacaaaagactgaagaacaaatactcgatacaactctatttatactcaaagactcgattcctccttggaccaggattcaacggaaaaccttaacgaaaaataaaggaaaaatattcaaacgaccctaataatttcttgaacacagaaaaacgtgtgtgacacacaaagcccaaaactaaacatcatcagtctctctttgtaaaacgctttatgcaaatatcagagcaaagataagaaactgaggtttcaggtatcttatagatgatagggtacatgcaatgcgacttacactgcctgcaaaacgggcgagatacattcttgttgagcacaacctcatatgatcccgtctcagcctttactacgcttcctggcatgagccctgaaaagtctccgactacacactctgtgtgcaaactagcccattgatctttacatgtgtagaaccatttctctggattcatttttttctcacaaatctcacaccaatatataccatttgccttttcgccatagcatagtaagagaggataatcgtcaactctatgctttaacactcgcggtaaagtggcgcatttgaagcataagacaaatccacaaccatcttcaatgcacctgagcattctagttcccgacatgttacaaccattgcagacttcttccatctctggtgaaatgtaatataagggatgatcgggatgacttggatggacaaatggctccaacactgaacaacatatgacatctaatttcatatccccatattggtaactgaaaccattggagattctaccacaaacattacaccaaaagtgaccagcctcgcgtgtaaataaagtaagccgttcattgtgtagcacatgtcgtttccttttaggaaatttagcacagttttggtgaagaatgaagtcacaatccatacaaccatagaaggattcgaggcaaacggaatgggtgcatgcgctgcaccgcttgttttcatcacataaaacaccattgtcgtcgagttttaggtaatgctcttcgtggctgaaatgttgtattgtgttgtcatctattaccacatacggctctatatcttctgtttcttcaataactccttcgagttctttcccgttccacacatcttttcttgtagcacatttggaatgaacgacatagttagaacacctttgacaagaataacctccccaagtccaatccactttttggcgacaaactccacacacagaatatacaagacccagaagattagtgcgagcaacacggtgatcatgccgatttatgtttataaggcgtggaagggtaagacactcttggtggatgatgaaattacattgaacacatatgtaagggcttcgatctcccttcagcccacaagcattacatgtaaaagagtcgagtcttgggagaagagtgagttggtgatcatgagttttcgaatcctcgaaagatattgatggcgggtttaaagcacaacgcatatccaaggtgaagttacatggagaacaatgatagaacaaagggctatcgatctttttttcgcaaagacgacattttccatcagaatagtctggtagttgacctgtgagaacaagctt

SEQ ID NO: 514 - DNA, 94536 bp, Arabidopsis thaliana
aagcttgcttttgaacaaatattcaagtccatctacggcttgaccacagacgaagccgttgttgcagaagaggaggctaagttagccaaggtccttgatgtctacgaggctaggctcaaggagttcaagtatttggctggtgaaactttcactttgactgatcttcaccacattcccgcgattcaatacctgctcggaactcccaccaagaagctcttcaccgagcgtccacgtgtcaatgagtgggtggctgaaatcaccaagaggccagcttccgagaaggttcagtgagaaatttctaaaaggaaaatatggttttgcttcagtcacagtaataatgctaagattaaataagcggctttctcattgcccaatttctcagtactttctttctgttgtatcctctgttttctttcagttatgtgagtgtgtgtgtatgctcttgagagtatctttggcaaaaactatttatctaatcttcaagctattctaaaataaatcaattagttaactaatgcaaagattgcgatgtcttaactatggagatactgactagtgagaatagtatgtaaggactttagtctggtggaaatcttactttggaacgtttctcctggcgaaagaagttgacttaagaagactttgaacgttcttatccttaaagtttccttgctttgtcatgtctgaaaatgacaagtaaaatatagacgtaagcttcaaatcagacaaaacaaaacacatcagatttctggacctattcacctctctataaataacagaaacggttagagcagcaagtttgtgtttttcaccatcaattttgtaccttgaccgccgtaaacgcagggtgaagaaagtccacctagtgtttatctccaactgtttgctcgtctcattactctgatgactttgtggctacccaaagaattgcgagtaaagccagccatatatttgcagactctggtcatcctttaagttagaggctttgctacatcaaatattcacataaaccataaagattaagtccaccaagaaatatcctttattcggagttttgtctgctagtatcatcaagtttacttcaccacgatactccaatagtttccagatattatataagaatgaaaatctattacaaagcatttttataaaaaacataccattgccttcaagggaccaaggaagaacagtaagatcctggtgaagaacacaatgagatgagggttctagtacaaaatcttatcaacagttacaggctacgcacctgctttaaagattcttcaccgagtgatttgtatcttctgcagaaatttagtaacaaattagcaaactcaaaccaagcaacatcattagcatgagacgtagaccaaaagaagactgaactagattccattatctgaagaacagcaagagaagctgagaagggctaatgaaagtgaagaattactgatacatgataaattaaatccgatgggaacctctcaacagaaccaaaatacaactttgataaacttcaacaaagtttttattaaagtgggggaaaaacatgaactaaaaaccagtaataaaagaaaagatcattctgcagcattcatcagcatatttagtacatgctgtacttgtcgttcgtcgcttcgggtcgaatgctcttgtagatggacatggcaattggaagaatggctgtgagagcgatttgcaactgatccgagctgctggttctgactgtgatctgtccgctcatcttgttgttaagtcctgcacgaagcgcaatctttgagttccttccaacagagacttgagattggagattggctccaagggctaaatcgcctctccactttaccagagacagcccaaaagaagattggtcctgtccaattgggaaatcagcttccctaagcctgacctcgaggttcgcaccataggccgaatctccctgtgatcgcattgtcccagtgctgcccacaagcaccaaccttttccccagtgctatttggtcctcgagtttgaccccagtggcgatgttctctcccaagaatgtcactgaccctccaacagttgtcttgttcttcctcaaattcttgaatttggtttctcctctgaccacatatgccagctgcttgcctacattctgaatatcgaaccctgccatggtggatccattctccccgtgcttagcagacacagaggagtccagatgaatgttgaactctttcttgtccttggtgacttggacagtagctgtggcagggaaccggctagctagagcaagactgtgttctgcattgacgccgtcatatccacagtcatggtcccaaccatgggtatccaacactggcctggttaggagttgtgaagtgggttccagatatcggtatcggtaagctgagttatcactatcaaatgaaggtggcaaaaccatatcgggtaatggaactggcactgcagctggagccccgttttctggatcatcttcttctcccggataaccaaactcactttcacccagcttcttcccgtttttcttcatttctttcatcctctttaattcctctctccattgcttcttctgcaggagctttacacggtaatcatactcctcgaaatatgcctttctctgttcatttgagagctttgcaagttgggtttttcgaagaggcttaaatggtggcagctggtcatactcatcatcttccccatcttcctgctcagaatcagacacatcatcaatttcgatatcagagtcaacactatcaccaccttggtctccagggagcttaggatgtgcacgggactgcaacagccaagacaacaagtaagggagaggcggggatctaactcggaaaccaaatactttacgatggtccaatggttcttgaggcctcaatagagaatttgtttctgacaaaaccttcagggagtaacacaatagcaacagctgagatctccaagtttggccattcgggagaaccttcactccctcccggttcttcctacacaaggggtgattctcaacaagtgaaactggattcatcagacttggattcatcaagcgtagatctccaacagcctgtcctatagactgttgcacaatatgtgagcactgcgctacaaacacatcatagctcaatggggtgccagatgggccatcaggaggggcagaagccgcatgggtcaatgtcactatagcgtttttccatatggatgtaccaagagaagcagtaatcgtccttagcaagggcaaattgttcaagtccctggtctgggtgtcaagacgatctacatatagtacaatatcagggggacacttcttcattaccttctttacagaggacaacatttttgcatttgtactttgatccatcgcagcagacttcaaacccggagtatcaataaaggtaatcttgacaccattcaccgttccagaaatttctctaaccgaagtggttgagagcccaaaagcatcaatggacgcaatctggtttcccaaaatggaatttatagtagcactttttcccaccccggcttttccaaggaccagtatgtttagggagaagatcaattcttcgttgccctcagcctcagactccacagccttcttctttgcagcatcaagactgaataactgccctgcttgtctcccagcaagtagtgcaagacggtaaagaacctgcgctgcaattgaatcttctgccgaatgacccaacctttgcaaaagccgcaaaaacttcacacggaggctttgcaacttttctaatttctgtttctcttcctcgctcaagttaatctcagtctcatctgccattgtgacattagaattggaaaagatgttggaacggtttgcacgtggagctgctgcaggcttcaagggccttaacgatgaactcaaaccagcaggtcgatccatagagaaaagcttcgtgccatcctgagatgttatggtaaaattgccaccttctgaacttccaccaccagtggctgccttcaaaagcgcagccaaagctgcagtatcaaacattttctcctcaccttcatcctctgtgtctacatcctcgtcagaatcggtgacaatctggccatcaatcctatctgacatattgttagaaatgtttgcttcatcagaatgtgcctctataccagaagaagccttttccaactctgctaagaactgttttgcagcttcagaactcccaaatatcatctcttcagtttcttcttcactttcagacccatcaaccctggtaacaccttcgccagaaggttcctggtccacttccttgcctccaaagctaaactcacgagaagaaacaatgtcttcgactgggagcttgttttcatcctcttcagcactgtccccttcgacaactttccgaacctcaaactgtgactcagctgcaggaattgaatcctcttctgcatcaactgaacccacttttaaactttcagaaacaggcaattcttctacttccacacctacttttggttcgtctggctctactttggcagcctctgatatttccttaacagccaattcaaaatttccatcatatgcagcagtcaggtcatcaggttcctcaatatttgagatggtcttgtcaacctcatcatctttatcatcttccttaattacagcctccttagccgccccgacaaccacaacccctggctctgcaacattgatatcagcatcaacagagtccaccacagaggagtcaaccatagagtctccttcactaaccaactttcctcctccctcctctgtggctttatcggattcaagttcaacttcaccaccttcaccttggccaattggatcaaacttattatgcacatcagggatgttgccatcagtttccagcacctcactcacctctacgtctccaacaacaacaacccctggctttgccacatctacattcacagcttcaatagcagatgagtccaccacaaagtctcctttgttgtttaacttaacaccttcttctgcatcatcgactatgccaccgagcacactctcctcctctttggttccattgtcagctactgcactagctgccttgattacttcagcataagtcatacccttctccaatccgttggctttttccacatcctttggttcactcccactctcggcagctacaacctctggctctacagcactggtatccacagattctaacttagaggagtctgcaatagagtctgattcgctagtaaatttttcttctacctcctcaatggccttgtcagacacaggttcaaattcaccactatcatcatccccaatttgatcaaacttattagccacttcaagagtttcagcatcagcattaatcttcaactcctcacttccctctgcgtctcctacaacaaccacccctggttttgccacatcaacatgcactgattctacaggggacgagttcacaatgacgtctcctttatcagttaactccacaccctcttcttcaataacattatcacttttatcgtcaacatcaacttttccacccaactcactctccccctcatcatctttttttgttccaacatcttcttcttccacatccttcactttactctcactctccccatctgtggaagcctgtttcacatcaacatcaacactcccattttcaatcttactctcaccatcgtctttaatatcctccacgtcctccttaaccttcttattctcctccacaacccctacaccatcagaaacagcctccggcttcggagataacgatgaaacatcatctacaccaattgtctcaccagaaaccacctcaggcttcggagtagcctcaggagtagtagaatcctcctttaaagaaccatccacctcgtcggaaaccttcccatcacccaccaaattcggcttctccttctcggagtcagataaatcatcagctccaaccttatccgaattaccagacacagcctccgatgaggaatccaactccttggcactactcacagcaccaccatcctccttatcggcggctgcagcagcagcggcggcgacaacagaagcataggtttttcctgataacaaaatatccttccgattaaaaccctattcccaaaaacgcagattaaagaagatataaacgagaaagaagaaaaacctgattgccccgaagaagcgtagaaggggttggttggttctggagtaaccgactttgagtccatttccgctttgctactgagactctttctccgccaaacttgtggaggaaggagatagcgatagatagatagggtttaaaggaatttacccttttttgtgtgaaggtttttatgattgagaatttggctgctctctctcttttgaagaagagagaattgggagagataaggtcactcggcgaacaaaaaatgactcttcgtttttcttctttgccttgggattttatcttctcagtttgtgttttgaggatgatgatgaaattaccgaattaccctcgcttctatgttggtgaagtttccaagagggctctcttttgtgctacgctttaaactgtgtcgcttcattggctcaagccaaaatatatagagtttctttttttatttgaggaagaagtacaataatcatttgtggttaaaatttgaaaaacattgtatcattttaaaaaacagtaatttttttgtcaagaattttcaatttttgttgagtaaatttagaatattttagtcactttttggaaagtatttactgtttaatattttgtttttattatgcacaattctccaaatgttaaaatcttccccaatggaaaatgttttgatgggctcactaaatctagggtttttgaactcatgagaattagggttttgttatatcttctctttactaaaaaccaaaaaaaccacacaacaacaaaataaaataaaacatttaaaataaaaaacgagataacattttgagatttgggttttataaagaagaaagaaatcttttttgtatctttgttgatcctccctacccgaaattgcttggccacaaacgattttctcaccattatctacgaattatcttggatttttgtataacacggattccatatattaggccgtgattttagttttcagatgggcttttataaggcctccccctaataatagcccgtatacatgattttattatcaattaaagacattcagatttcagatacaacaacccatactgcaaaagaatctgaccacatgccaaattttgtttttcgaattaaactcctaaactacacaaaacttgtgaatatgatctcagaactatactaactcaatgtgattttttcacattttgcatactaaaagtaaataattagttgaatgtgaaatcaggttaaaaaaaagttcttgaattaacacagattattgatccatgaagctacaaaatctcaagttctaatggattacaaagaacaaaaaggaagaaaaacaacattttgatttcgtaatagaactctagacgtagagacaaagtaaaaccaaagaattaactgatgtctctgcacaatactttatcatccatcttagtacaacaacaagcaaagacacaagacataaatatagcgagaaacataacacaaatcctaaacgcaaaaccgattcaaacttgattggtttgtaccttaaccgccttaaacgccggatgaagcaacccgagctcgtctttcatctccaacggattgctagtctcgttccgcactctcttgactttacgactagccaaagatttgtgagtgaaaccatagatttgcagaatctggttatctccaaagttaaaggctctgtccatttgttttagacaccgttccaccgggtaatcaccaaatttcccacacggtttgcaaccgacaaagtgagtcaccaatggccatctgtgatctcctagacccgggtggtagttttctatcatttcttcatatctgtccacaagaatcccccagtaaccgtgaagatagtatccactttctaggtacacctataacaacaatgcagtggctcaaatgagtagctcaacaaaatccaaaccaagcaaagatttgagtttacttcaataatagacccttacacagatgtcagaaaccacaagatgcaactcacattgtcatttttgatgatcaagagacatgataaaccacaaaaagcaactcacattgttatttttgatgttcaagagacatgataaaccacaacaagcaaaccacaagtttccaaatttagtttttttttttttccacatcaaaccaatgctgaaatggaatcaagttcatagttatataccagtcaaaatcagtttgtaccttattgccccaagcgtctcgctgagtagccaacagataaaccatagcagactgatcatcagcttcgaacaccggtctatccttgagctcacgggtcaaaaccttacccgcttcttcacggatcttccctttaggacccatgggagcccaagtatcaagcaaatcaagtgcccattgattgttcctaagcaagaaactccctgtattcaacccaatccaattcttctgatcataaaccatctcattccatccatgcatcaccagattgtaatctttatacctctcccatggaagctcaaaagccatatctgtaaacatagcatcactatccatccaccaaagaaactcaatctcaggatgtgacaacaaaagcttcctaatcaatggaagctttgcccaaaaaccagccatctctgcatcgagaagagccatgttgtagaagatctcgatcccatgtaacctacagtaatcgatcttgttcttgatcgatttcaagaggtaatgatcaccgacaggattctcacatggttttggcgccgaaccagtcaccaaaagaacacgtggcttgttaggtccgatgaaattagggaagctagggttcttagctaaccaatcagatctctgctcatcccaatctgatatcttgggtccgagagtgtaaggtttattcgggtcgggtttctcttcttcaccttcgtcaacgaaaatcttgttgatgtcaaacgtctcgtagttattactcccaccggaattacctccaccgtcaccggaagaagaatctcctccggtctgaatttcttcgaggacacggtgaggctcacctcgtttgcgtgcgtggaaatgttgacggatctcgtcaagatcttgctccggagttccgaatttaccggcgccgattgtgctacgtaggacaacaacggtaagaagaagacagagaatcgttacctttaattggcgtaaagctctttggattctccggcaccggtaagctcctaaacacctctcaatcatcttctttcttcttacaagattctctgtaaaagatctgtgctttatgtgtttttaagagaagatctgagtttccattaatgtaagagattcgaatttgataataacactgttaattaccaaagttacttactacaacaagagaagagaagcgaggagagtttttgtgtttttggacacgacagttaagattgtctgatttcacttaattgtcggtggtagtgatgagttagtagcgttgttgacacgtggcgaagttctagagcgtatcatttgcgatcaattatcttgaccgttgatgcagttatagatctatctataaaaaactaaaaatctaacagcgttgaaaagtcaactcgttgttttttttgtacaaactcgtttgtttatttatatatagaaaactagttgaaaagaaaaaggagcataaatagcataatattttaacttgtttgatatagttaaatacttaaattactaattagaggttaggaagttacccaaatgacttttggaattcattatattgtgatatggtttataaaaaatgttttttttccctcatcatgaaaagataccattattagtattacataagtactagattttaacttacggtgtaccgcggaaacaatttatttttaaagttagtatatataaaaatatcatttattttattaatgttgatcttatttatgatatgtttatgaatcatttgtttaaatattttagtcgatgcgggacattgaaccacatatttttcgtcaattggttaatatattttcatttttaaaatttcgaatcacggaaaaaattttgatttttttttaaactctatatattatataatgatgttaaaaaattgtgatatattaaactttttaaaagtttaaatattgataacgttttattaagtttaaatatagaaataattatatttaaaaagttaatattttttaccttttaggtaatgacataataaatctaaaagcaaggatttagaagatttagatctttaattaaatattttcattcctaaataattaagcatgacattgtaaataagttcaaatacatgatttatttatttaaacaaaaacgtttagtaagaataatatttatttaaataaaaaactttgttttaaaatattgttaacaaatatgtttatgctaattttaagggattgatgtgaagtttgtttggattaaatttgattgataatgtgattgacaatttaaattaagaatgtaaagtaaaattaattagtttgaaaaaaagatttaatgctaatggcattattgtaaataacttcaaatctaggatttatttggtaaaatggctccaaaaatgtatatgtagattacataatgaaaaaaatatctcataaaatatcagaaatcactatttatcattacatcatgaaaattataaaacaatcaaaaatcattaaccactaattacattacgaaaaagtttatatcatgaaaaacatcaaaccagtctcttaagggtatgcttatctcctattatactcatctgttaggccccctaatgatgatgtgacccccttctccgttgaacgaattcagtctcttcatccttttaggtgtgactcctccttggctactcagttaacagctattcctagtgatgaagagatcactatggccttattctctatgcctaggaacaaggcgcctggtccagacgggtttccagtggaattcttcttggaagcttggcctattgtaaaggaaagttttattgcagctattaaggaatttttcctgacaggtcatttgttgaaagggtttaatgccactgccattactcttattcctaaggttcccggggctgatcagctcaatctctttcgtccggtggcttgttgtaccacaatctacaaggtgattactcgccttatctctaagagactcaacctgttcattgatcaagcggttcaatccaaccaggttggatttattaaggggcggcttctctgtgaaaatgttctcttggcgtctgagctagtggacaacttccaagctgaaggtgatacttctagaggctgtcttcaggttgatctaaccaaggcttatgataacgtcaattgggagtttctcatcaatatcctcaaagccttgaatcttcctcccatttttataaattggatatgggtttgcatttctactccctcttatagcatcgcttataatggtgaattgattggcttcttcgtaggaaagaaaggcatccgccaaggagatcctatgtcctcccatctgtttgtgttagtaatggatattctggccagatctttggatttgggagcagtggagggccggtttgttctgcatcccaagtgtttggctcctatgatcactcatttgagttttgcagatgatattttggttttctgtgatgggtctctgtcttctcttgttgccatcctggatattctagacgtgtttaagaaaggttcgggccttggaattaatctgcagaagacggccttacttttagatggtggtaactttgaaaggaatcggattatggcagctagtcttggtgtttcacaaggttctctgcctgtccgttatttaggagtgcctcttatgtcccaaaaaatgaaaaagcacgattaccagcctcttgtggataggataaattcaaggttcacgtcttggactgcaaggcacctctcctttgctggtagattgcagctcttgaaatctgttatttactccacaatcaacttttgggcttcgatatttatcctccccaaccaatgccttcataagttagagcagatgtgcaacgcgttcttatggtccggagctccaaactcagctcgtgaagcaaaaatctcttgggatatagtgtgttcttctaaggagagtggtggattgggtttaaaaagattatcttcttggaataaggtccttgctctcaagctgatttggctgttgtttactgcttcgggttccttatgggtctcttgggtccggttgcatctactcggccgtaggaacttttgaaatcttaatccctatctttcgggcagctgggtttggaggaagctctgtaaacttagagaagttgctcgtccttttgttatttgcgaagttggttcaggaatcactgctaggttttggcaggataattggacaggtcatggaccgcttatacacttaacggggttgaccggtcctcagctggttgggctttccattacctctgttgtcagggacgccattaggaacgatgactggtggattgcctctagtagaagcaggaatccggttattcttcttctgaaatctcttcttcctcctgttgggaatttggttgattgtgagcatgatgactcttatctttggaaagtgggtgatcgagtgccttcttcaaagttttctacagcggatacttggagagctctccaacctttttctgtctcagtctcttggcacaaggcagtttggtttacaaatcaggttcctaagcatgctttcatctcatgggtaactgcttggaacaggttacacactcgggacaggttaagaagttgggggctcattgttcctgctgagtgtgttctgtgtaacttggtcgatgaaactcgggaccatctcttctttgcttgtaggttcagctcaagaatttggaccttctttatgagggcggttggattttagccgcctcctcagttcatgaattgcttgctgtggcttaattcggctacaagggacaagaatctaatgctcattatcaagcttctcttccaagcttctgtctactttatttggaaagagcgtaatgctcgtattcactctgaaatcaggcggccttctcatcttatcactaaggaaattcagatggtgataagggctcggttggatcctctctctcgctcccgcgctcctgggagatccggactctcgcttttgggttcttggttttctctcttcctcaatagagatcctcctcaagtctgatgctttctccttgtgcaggtttcaaaggttcgggctttggtgttctagctccttggccgtctgctgtgatggcttgggccttctgggcttctgcctttgatctagccttttaagcttgtaattggttgttctttgttctttcaggcctgcgtgctgtgttggccttttggctttgtattgcaacttcttttggttaattggaaatttatgaaagaaaaaaaaaaaacatcaaaccagtaataaaaaatatcaactatattaccaaactccgaaactttatattaactaatatagcaagcagaacatattattttgcttcatttcatctttttttactaatagttatactaaaagaaataccttcttccccaattggtggattaccccaactgaaagtttgtctcacttcattgcttgtacccaaaatctgcgaattgaagaacaagagcaaaaaaacagattttgactaatgatttaaagaacaagagaagtagaaatgcaagagaaaaatgatacagataaaaaatggtttttgatatgtaatcaaattaaagtttaaattttaaatgtagtgtatactgttaaattagcaaattaatgaaactctaaaaaatatatgaatgagtttgtttggaacgcaaaatgatacaaatctaattttccaaaaaaaaaatcttaatttgatcttattttataaattcatttatttcccaaaatatatttcgatttctagtcataagtcataactaaaaaaaccgacgtgcgaaagaaaaagaagtcttattatataaagtatggttttcaaatttagtaactcacaaagttgtgccatatgtcaacttaatcgatcttagattttgacatgtctaatcttattatcaattttaaaaaatttcaaatgtaaaaaaaagaagataatgaaactatatagttttaaaaatgtaaataaaataattataaaaaacaaagttagttaaactttataaggaaagaacaaatacatatcttatattaaaaaaagtttaatgtaaagaatataattataggaatgtaagtatatattcatatataatgcaaaatgtaaagaagataattatatgtatcttattaaataaaaatagaatcagttactaattcttatttgaaactactaattctaaaagaaaaaatataactttcttccttcaaaatttaaaaaaaaatgaagaaattatacaatcttgttatataaaatacaataaatgaagaaattttacaatcgaatattaatcatagaaggaaaatgattttaaatattcacctctatataaacaaatcaatattctcttattttcaccaaacaaaaaaaaaactctttaataacaccaccattgctttaacgtcattcattggtaaaacatttctttttgttacataattctcaaaactgtactaagaggccaaatatgttaacttttcataagttaggagatttgcatgtgttattttaggatatttctccaaaagtatctatatgtgttattagtctattttggcatgtattaagttttttcaaagaatcatttagcatggatattaacttataaataaatgactattgtagttcaaaataacaatataagtaatttaacattattttaattggattaaaattataattatcattgtatagtgtttttattcgttaaatgaaaacaaattctttttgaaaaaattatgagcttaagaatgaatttttgaatatgtgatgagaatattagtatagttatatttatgttttattctaaatttttttaactcatggtcataagtgaaaacatcataaatttggaacaatggtttatatgaattacttttcgattacttgataagaattttagtttatatttttttatgttttatttattaattttaagtcatgagataaaattaagttttgagattacaacatattgaaaaaaatattattaactcccataatttgtttttggtatgtatacatattattttgatataaacaatttagcacttatcgattaagatgaagtgttcagaatcaaaattcagtttattatgatgaaataaataattaaattttatcgccaaatggaatatgtaagattaagatttggtttttaagaaaaatatatgtgtgagttactatgtagaattaaaatttatttctgattataaatatttagttaaaatgtatatcaaatgaaatctataagattgaaaagtttgatttaaaaaacaaattctaaatgaaatatgaaaaaactatgaattactatttagaatttaaatatcataaataaaaaaattacagttatattttatacccgcctatttaggctggctttctttaatttgtatatatattataataataagaataactattgaatatcttattagacatgaacaccgattcttttctttaatagtattgctgctatatacattgctactaatccggtttttcacgaacgcacaaaacataacatatagagataaactgccatacagtccgtgatcgattagatgatggtgaactcaagctcattcacgttccaactgaggatcaagtggctgacatcctcaccaagcctttgttcctcatcagtttgagcatcttaagtccaagatgaaccttttaaacatttttgaatgctcatcttgaggaagcatattagagtgtatggttatttatggtttactagtcagattagacttggtttacttaaccgtaaatgtatagattagtatacatgtatatatagtttgtgtacagaaacttgcgaaaatctatttcataacaaactttctctcatcatctctctttggtaatattctatattattaaaaaaaaaactcaattaaaaaatccagaagaaataagttaggtgttacacaatacactcctcttcattttgatacattctacatatttatcagtaattctcttatattataaaacagagtgtaccttaattgaaatttctacttcacaatttatcaaacgatcaaccaatagaacaaaaacatagcttcaaatgtagtttatatgataagatattcaaaacaattttaagagaacacataattttagtgtttcagatatagtccaagtttaacattaaaagttctgatctacaaagaggtatctaggctctaataaggattaaaatcggattgataacacccttaggcttgacatagctttctcaaggtaatggagattcttcgtttctgatcaatttcttctccttcccatagctgaaacccattctgctttcgattaatctcgtgtttccatcgataccgagcttctccagacatgagaatgagagatcccgggttcagcaaaacatccacagcttcatattcgttcttttctgcgggactgaaccgcatcacgcaaggtgactccagagagacgatggcaatcccatcttcaaaacgcagcagatcaacatgtgcacaaattccctgttgaaagatccatggcattgtcatgaaaacttgatctaaagtctgaattatccgtgactaatgatctgctttcacccattgtgtactctcttaaaccaactaactgttaccctattggttcttatagcttttgcactatcttccctcttttttttctctgcattttgccatgaatcttgatctaatgtctggctatgactggttatctgctttcactcattgtgatactcatactctcttgagctatctaattcaaataattaaatgttccatgaaactataacaagctgttattctattggttcttttagcttttgcattatccctgttaaaaaccatccatttttgcattgtcacgaaatcatgatctaatgtctctgtaaccctgtctcctatcacctattttgaaactctcttaaactaatctatttataacactccaagaaaccataaaagctgttagtctagtggttctactaaagaaacgtgaatatgtttactaagtagaaagatggtaagagcaaagtgaaagtatcacacctcacctggttggtacaaattgacaatgagctggtcgaacagaggttctctccagagtaaatcagcagacaagaccggaagatcaacagattccagtgtctcgcgtatgagatcagatagttctgttgcccatgaagggagatcaccaaatctcatcgcctaaaaccccggacaaaagaaaaaagacagaagctttagtttatttcgtatcatctcaaacttaacaccaagcaagatgacacctaataaccatgaatctgggttattcatgcaagtatttgttaccaaatttaataagaaaacaatagaaatgaacagaatcgagtctcacttcaagaggaaacaaaagcagcctaggaaacgatgatgttcactcattcatttaccaatctaagaattttggatcagtctcttattaatgcaatcgaataattaccacagaggtttgaaatccagtagtttataacagttggggacaagaagagaaaagaaaagatatctaagcaaaggataagctaaaagatttctaaagcattgcctccacatcttggggaagaagagaaacgaaatttagggttctagtacctggttaatagattcttcaacgaaccaaccttctgcagaaatttttaaatgtacaaactttagtgaaacaattcgacaaagcaacaacatttaagaattagaaaccaacgaagagccaagggtaccgtttagaatggcggagagtaaatgagactgatgagcaatagagagaaagtttctatagagccataaaccatttatctcctccactctctcccataccgccgaatctccgatccctatggtttcttttcccggccgatctgcgatatcttcatcatccgatgaatcgccaaaagctgctctcaaattctctgcttcttcgtccattattttatttttttgggcttcttctctatttctttgacgacctacttatcaatgaaaatcacgaaactttcatataaatagccccaagtcttttacaattaattccataaaatcaaatcaaatttggcaagaacgtaattaaaacaacctaatcctaaagattaatatcagttctttcctctgatcgaaaaatcttcatgtaggttgacatcacatggcaaggagaagcagagccatgacagcaatctgcaactgatctgagctgtttgttcggacagtgaaacacccggtcctcttgctgtcaagacttacaaaagttgttacctttgtctgtcttcccacagagacttgatgtcgtagattggctgtgactgttaaatcatctttcgaattttttagagacactcccatatgcggttggttttggcctattgggaaatcagcttccctaagcctgagctcgaggtttccttcataagatgagtcttcttctgaccgtgtggtgcctacatttcccacgaggacgactcattttccgagtgcgatctgtttctcgagtttgagaccactgggaattttctcaccaaagaatgtcactaaccctccaagagtcagctcgttccttcttgagttacataagttgctcacttccctggatatgaagccctgccatggtagaaccattgtccccattctaatttggaagatttatgaattgatgattaaaaatacaaaatttacgattttatatagagaatattacactcttaaacattttattaaaattatttccgtttttaggcactttcaaaagattaggcattttctctatgtttttttactaaaataccctcttaactaaaatattctcttaacccacgttttctctctttctctctctcttcatctctctctctcttcatctctctctctcttcacctctctctcttttcatctttgtaaaaaatgagaagaaacttcttcatcttcaacaatggcggcttgatttgatttttgttctctctcatgtgtcaaactcgtttcatctacgtagcatcgagatttcagttaatcgaatctcctgttatcatggacatgttatataaaatggatatagatcagtaaaaaggtttccgaatggatatatttaaatggattcgttattatggacaccaaaaaattgtttgttgatttttctttcagtttgcagagacctccaccttcaaaaccttatggacatggaactttggtttctttacaaaacacggttaatcgaatctcctattattattgacatggtatatagaatggatacggatcagtagaaaggtttctgaatggatatatttaaatggacttgttattatagataccaaaaaattatttgttgatttttctttcagtttggagagacctccaccttcaagatcttatggacatggaactttggtttctatacgaaccacggttaatcgaatttcttgttattattgacatggtatatagattggatatggatcagtaaaaaggtttctgaatggatatatttaaatggacttgttattatggataccaaaattttttaccaaattcctgagataatcgagatcgaattgtttaagaaacttctcccatttatttgcagaatcgttatcaccaatttttagtgagccgccgtcataatcgataagaggaatcaaacctagaagttatggagacgtggagagagaaaggcactacaaatgtgagagagagaaagagagagagagagagatctttttttctattttgcgtaaggatcgtggaagagagaaaaaatatttaatttgtgttaaaattcaaaataaaagtagttgtttaagttaggggtaaaaatgtcttaaaaaaagtcaaataatggaaaaagtgtcctcaccctcataagtgcataaaaaagaataagattatctaaaagtgcctaaacgtgtcacatttttatatatctccgtctttttttcttcttttttgtaaaatgacttaattacccttagtttttagtcggtgaagtttagagatcttgtggtaatttggtctttgcattcaaaacgctgaatcataaaaacaaaatattatgctgttaatttgactcaaattttctttgttataaagtataatctttattattattttgttcaaaagctgaagcattttttagacaaagaaagtcataacttagtagatattcaatatttaaaaaatgacattatttcctagattttgtagttaatacatttctatagagttatatattatgaatttatataaagtttttttttaacacaatgaatattatatatatatataagttttatgtatttaagtttccttttgaaggaaatgaacatacacattgtaaccgacttaaattaaattacgaaaaggtcacgtgatgtggcatgcatggatgtatatagtcaaaaagactgattaagagactgaattcatgcgaacacgtgcccaatacaaaacaaacggttagacgaacggatactcccaaagtgtttctgttcatcgaacgaaacgtatgttgctcttgttgttgttgtgtagtagtagcgaactacccggttcggtatttttttttcttctttcaaaaatattctcaacgatttcatgttttttgttttgttttattcatgttcttggtcaaacattattgatttggtttcgataaacctattcttgaggattttattatatacctttgatcaaaatacaaatgggtgactttttctttacttcatttgcttcttttttggggtgttagaaaaaaacacttaaaaaaaaaaaaataggagtgataaaacagagtttgaccatagtgtttgcgtcattgtgagtgaaaatgaatgtggtaaagtaaaaaagatttgactactagttgggagtcaattactccagaaaaagcaagtagatgaagaatcttacctccttatctcttgtatacgtgcttgtggtatttgccccaagggggggagctacaatacctctcgcattctccttttgtacaattataaaaagtgaactgtctttccaaaaaaggaaattattattatattctctcaatgtgaaaattacaatagtttatccgacttgatttcacatattttaggttttaattgttaagtttagaataataacaataatgataaatttttgaaaaagaataactaaaaataataattgatgaaattcatttagtttattcattaatttaaatcagctataagtctttttgttaaattgctaatttttatgtgttttacatgtttgtgcttttccaatatctttttgtttgaaaactttaaaagtcaataaattactcaattttctaaaaacgacaaattaaatttgtcggatgcgttaattccaacgtgtaagtactttttgatttatagataacggaattaccattatatagatcacaaagacataaaaacaaaagtacaatgtttaatccagaattttctcgttgacgaagcgtgtattcattgattatgggatctaaattgtcgtgtgtgtttataatttttttaataattaaaattattataaagtcaatttacattgttaatatgcaaatatatcaatcaaaatacacacataaatatgtggatttaaattcggatattatagtgttcaaattttttaaaaatatggaatatcgatggtcaagttatttatatatttgacccgtaaaatgtacagtaattaatttaaacgcagagagacaataaaaattaaataaaaaaaagttttgcaggtttatgtttaatttataaattgaccatcccagtaatcatttacatgatatctctctgattcttcgatttctctttctctctctctcgctctatccttctcctatctctaatctcttgtcttctctctctttctctatcgggaaaccaagcggctcttctttggatcaaaggcgaagtcaaggcggagaaagaaaagagagggtcgtgagatatggttgagacgagacgtagctcttccgcttccaagcgtttctgtgcttcttcttcttcccctgaagcatcttcttctcaaaggcctaacaagcgatctaaggttaagatcgatgccgctgcttcttctctcgaacctgtgcgttctttttcctcccaattccagtttttgattccttctctcgatttttgaatctgggttaatcttgtttctccggggatctgatttttttttgaattttggaaaccctaggcgacggcggaaccggctggttcttcatcagcgagcgaagttccgatcgagaatcaaggacctgcttcggatcctggatcggaatctggagagccggaacttggatcttctgatccacaggctatggatgcggagaagcctgttgttacaactgatgtccctgtgatggagaactctcctgaaaccgacgctaaccctgaagtcgaagtcttggccacacctaccgtagcaggttttcactttctttccttgtgatctcaccatttctagtctaaagtattctcctttctaatgttttggtgtttatgtggatctaggtgaagcggtggcggatgctgacaaatctaaggcggctaagaagcgagctttaaaggctccatgggcgaagctactttcccagtattctcaggtgattagttctgtgtgttgtctaaaagtctgtgaattgcgtttcttgtctgcatgtccagttcttgcctctctttctttgtttttcaatatgttcttttattctgaatgtgttgtggtgtttcgctgctattacagaatcctcaccgtgtcatcagaggccctgtgtttactgttggacgccggggatgtgatttatctatcagagaccaagctatgcccagcaccctctgtgaactgaagcagtctgaggtaatcacatcagatttttctatttccaaaaggggaagagtcttttgcttacatagagtctcttgcagcacggtggtccatcagttgcatcccttgagatattaggaaatggagttattgttcatgtcaatggcaagtgttaccagaaaagtacttgtgttcatctacggggtggtgacgaggtgatcttcagccttaatgggaaacatgcttatgtatcctttttggagttgcgtgaaagttaattcgcctaattcactagttattaatttatcgatccattctaaatgatttataacgtttttttcatttaaaatcagtgtcttttggtaaaaatttcttaaccatcttctagatatttcaacctgttaaagatgaaaatttagcagctcctgacagagcttcttcgttgagtatatgtgaagctcggggtgcccctctgaaaggggttcatgtcgagacaagggcaggagatgttgatggggcctcagatgttgatggggcctctatattggcatctctatcaaagctccgcagcttccatcttctaccaccaattgctaaagctggcaagaggcagcaaaatcctgcggttcctgtggtaccttccagtttcaatgattgcatctcggatacagacatgaacgatgctgatagtaataatgaccatgctgctgttgcttctgtggaaaaaattgctgctgcttctacccctggtactgccaatgagaacctgaatgtcgatggcagtggattggacccttttcaagaagctgatggtggaaatgtccctgctgctggttatgaaattagaccaatcgtgcaccttcttggtgaatcttcttcatttgatataaggggtagcatctccagattactggatgaacgaagggaagtgaaagaattcctcagagaatttgacctttcatcaactatatcgactagacgccaagcttttaaggatagtctgcgaggaggagtactcaatgctcaaaacatagatatttcttttgagaacttcccatattatttaaggtaagattgcttaatattatgttacatttgtattacacatcttgctttcgatggtttgatgatttatagccaaaaatatatctaaattgtctcagtgctacaacaaagggtgttttgatgatatcgatgtatgttcatatgaacggtggaagcaagtatgcaaattttgcaacagacttgactacagcctgtccccgtatcttactctctggaccatcaggtatttctactttttgctgagtccattcctctaaacaagtttacctttgtatatataaggtctgagattcctatatttcttaccatttgaaatatttttaggctctgagatatatcaggaaatgttggcaaaagcgcttgctaaacagtttggggccaaattgatgattgttgattctcttttgttgcctggggtaatcttcttttcccctttattttttttttcatcttttagttgacagacctaagtgatctagtagaatgaggtccatgaacaggatcttgataaatacatagatacataaatcttgatccaaaaagaaaaaatcctaatagtcgagaaccaatcaggagtgtttcagcttatattactactaatgtatatacacattccaatgttgttttatttattacaatatttattgcatcttgagcaagtggatattaactggtagtgttgactttttcgtcccaaatagcttatattactacctatcacagtgtccactcggacatcggacattatttttcagcaggctcctttataagtaataggtttgttcattccggtgaattcaatgattttgtactgtttctggatggtttcagggatcaccagccagggaagctgaatcctctaaagaaggttctaggcgtgaaaggctgtctatgcttgctaaaagagctgttcaggctgcacaagtattgcagcataagaaaccgacttcaagtgttgatgctgatataacaggtggctcaacattaagctctcaggctttgccaaaacaagaagtgtcaacagcaacttctaaaagttacacattcaaagcaggcatgatgtttttcttttcatctgactgttcaacttcttttgatgtaccactcctgttttgttgaacaagcatttttatcattttcaggtgacagagttaaatttgtaggtccttcggcttctgcaatttcttctcttcaaggccagcttaggtattgtttactgtttttaaaagtcttcacatctgctgtaaatgtgtgttgtattcacaactttgctcttactttttccctgctatgtaatataggggaccggccattggttcccagggaaaagtagcccttgcatttgaagacaactgtgcttcaaaaattgggattagattcgataggcctgtacaagatggcaatgatcttggtggcctctgcgaagaagaccatggttttttttgtgctggtaatcgcgggctgttttttttctttctaactttacttaacttaaaaagtgaactttattaatattattctttgtgtgcagctagctcacttcggttagaaggttcttctagcgatgatgctgataaactcgccgttaatgaaatctttgaggtagcttttactttaagttttgtgataactacttatggcttgtagctacaggatagtaacctcttgacccataccataggtcgcacttagtgagagtgaaggagggtcattaatattgtttctgaaagatattgagaaatctcttgtggggaacagtgatgtgtatgcaaccttgaaaagcaagcttgagactttaccggaaaatatagttgtcattgcctcgcagacccagttggacagccgaaaggagaaagtaggaaactttttcagtcttctctatttctgttttggtatcttttaagttggttttaatttgcttatctgtatagttaattagagatttgatggttctttttcagtcccatcctggaggtttcttgtttactaagtttggtggcaatcagacggcactactggatctagcatttccggtatgatgacctgacttatcttgaactattttccatttcttgaaatagttgtgtacctaaataattctatcctgatggtaaggttcaccaaagtcatcttagatttggtatcttattgatgaaatgatttttcctattatctgcaggataattttggtaaactgcacgatagaagcaaagaaacacctaaatcaatgaaacaaataactcgactatttcctaacaaaatcgccatccagttacctcaggttgttaccttcattcatgatttcttgtctgggataattttatttttcctttttcttatgctccgaagatgtaataggaagaagctttactctcggattggaaggagaaacttgaccgtgacacagagattttgaaggttcaggctaatataaccagcatccttgcagtgagtatcttctaatcatgcccttagtaatataagcgttccttgtttcttttcatttttttccttttgcttatttctttgtaatgatgcctgcaggtcctcgccaaaaacaaacttgactgccctgaccttggaacgttgtgcatcaaagatcaaacccttccatctgaaagtaggcctcgttcacttgctttttctttctttattttgtcctgataacccggttgtttgactaaccaaaaactatgtgttcataggtgttgaaaaagtggttggctgggctttcggtcaccatcttatgatatgcactgaacctatagttaaagacaacaagcttgttatctctgcagagaggtgagttttcttctataggctgtgtgtgatactaagatacatgtttgatgtataaattacattttggcacgtgttgcagcatttcatatggcctgcagacgttgcatgatattcagaacgaaaacaagagtttaaagaagtctctcaaggtaatattatgttacttaatttctttcttcccaagctgcctagtaagttccggattaagagttggtttactatactgtttcaggatgttgttactgagaacgaatttgagaaaaaactgttgtcggatgtcattccacctagcgatataggtgtttcctttgatgatattggagctctggaaaatgtgaaagaaacgttgaaggagttggtgatgcttcctcttcagagaccggaattgtttgacaaaggccagctcacaaaggtaccttttattgctatacggatttatttgttagttgttactcctacataactgaaaccaaacatatatttgatgtttaatgcagcctacgaaaggtatactgttgtttggacctcctggtactggaaagacgatgctggcaaaagcagtagcaactgaggctggcgcaaatttcatcaatatctcaatgtccagcattacttcgaaggtaactctcataaagtgatatgatttccttttatgctttcttttaatgattgtacttgaccatttacactaaatgctttgcagtggtttggtgagggagagaagtacgttaaagctgtcttctccttagcgagcaagattgcgccaagtgtcatttttgttgatgaggtatgtttgaagatattaaaaagcgttctctgttctctcccacctttgaagccagtctttttatgtactttctcgatctgatgattgtggaaaatcattattcaggttgatagcatgttgggtagacgtgaaaatccaggggaacatgaagctatgcgtaagatgaagaacgagttcatggtaaactgggatggtttaagaacaaaggatagagaacgggttctggtactcgctgccaccaacagaccatttgacctagacgaagctgttattagacggcttccccggaggtaaaaccaccacttttccctctgttgtctgttagttgtgaagaatattgcaaccattgttgatcctctcctgcatactacttctgtgcagattgatggttaatcttccagatgcaacgaacagatcaaagatcttgagcgttattctagcaaaagaagaaatagcaccagacgtcgatttagaagctatagcaaatatgacagatgggtactcaggaagtgacttaaaggtctcgactttctataaccttccctctcaatctccttcccctgtaaaaaaactcacacacgtattcttttttggttgcagaatctgtgtgtgaccgcagcacattttccaatccgagaaatactggagaaagaaaagaaggtttggtttctgtttaatgcgattgcttctcgaatcctgaagtccatttacattactcgcataactcattctttttattattctggctgttgttttgactacaggagaaaactgcagctcaggctgagaaccgtcccacaccgccattgtatagctgcacagatgttcgttccctgacaatgaacgatttcaaggctgcccatgatcaggtaagtcaagacaaagaagccaatgagtttcacatatgtgataataactttgaaaagaaagctaaatgatcagaaacatgtaggtatgcgcaagtgtgtcttcagactcgtcgaacatgaacgaacttcagcaatggaacgagctgtatggtgaaggaggatcgaggaagaagacgtcgttgagctacttcatgtagaagagagacaaaagagagagggagggagatttgttcgtttttgatctctctcgtgttcggtttttttttttgaatctcattttggtcgtttaatttataaatttgtgtacagagagaaagggtgttgttcgttttgctgtctaattcattttctttctcaacataagatgaaaaaaacattcgctgtataatctaatacatgcgtatgtatatagaggctcggatcttttaaggataaggacataattctaaatcttcaaggtgtgtgctttgagagtctttagaaaactaaatagtgcattattataaacttatgatctgatatgtctatacgtctcgtaaccaaaaccagagtatcgaaactaaagataagaaaacgaaacgaaataaagcaatttaatttacttaccattgcacaaaggcaagaagtgtttggtgccaaatgacgggtataacattcgtctccttatgaaatctaaagaagtgagtggtaaccgcatcaatcgcccgatacgccattgcatatctcttctccagaataactttgatgaagaaactgcatccacacacacaaaaacagaatgcaaccaaataaagacacacaatacctatatgtgtaagtgtaaggttagcctgcgttttaccttgttcggccataaaaattccaactccgccaaacttagcaaagcagcactgcagttcataacattagcactgcgttttattcacgcttaataacattagagagacgtttagctattgaagctccatccttggaaagcaaggcatcaagtaacttgtcttcttcctcagtggccatatcctggtaattaagttggatctgaaactcttgagattgctcatcaacatcatcatcatcaatcaaatatcttccaatccatacactgccttcttaataaaggcagtcattgggattttctgacttctatttgctgctcataggctagcttaaggatcttcggcgttagtttcacaaatccatagaatttagaaaccctatcaattccaaaatctacaaaaaggttttaaaatttcccactcaccttcctgaggaggaggctacgacgcgaatagctttacgtttccacttaatcgccattggatatagtcaagaagtagagactatgtgagattgagggaacgcaatttagcatatgaagaagaaaccctacttgactttagccctaaaatctattacgtgacccaagcggctacttgtacatctgtcataacgggcagaatattttggtctaagcccaatgagctaatatgggctttaaatcttaagtccattaacatcaaattcaatttgttcaaacgcgaaacgcaaatcgcattgtgcagctgcgtcccagtgttgaaactcttcgaactcccaaaacgcaaaagcttcgtcttcttcttcatccttgtctcaccttcgattttggcggcaaaacataaaccctaagggttttctcactctctctctctcttctcacacacacagtcccagagtacggtggtgttgattcgattgaggagattcatctgtttatagggtttagcaaatgcaaggagattcttctccgtctccgacgactactagctctcctttgataagacctataaacagaaacgtaattcacagaatctgttccggtcaagtcatcttagacctctcttcggccgtcaaggagcttgtcgagaatagtctcgacgccggcgccaccagtatagagattaacctccgagactacggcgaagactattttcaggtcattgacaatggttgtggcatttccccaaccaatttcaaggtttgtgtccaaattctccgaagaacttttgatgtttgggattctgatttttgccctattgaagtaggtttttctctatgtgtgtgggtttacaggttcttgcacttaagcatcatacttctaaattagaggatttcacagatcttttgaatttgactacttatggttttagaggagaagccttgagctctctctgtgcattgggaaatctcactgtggaaacaagaacaaagaatgagccagttgctacgctcttgacgtttgatcattctggtttgcttactgctgaaaagaagactgctcgccaaattggtaccactgtcactgttaggaagttgttctctaatttacctgtacgaagcaaagagtttaagcggaatatacgcaaagaatatgggaagcttgtatctttattgaacgtgagtttctttcttactaacttctttgatattcacacttgtcttgatcatatagtttttttccttcctgagtagttcaatggtcactgaatttctactgtttgatattcttacattgagtttcaaaagttttgttttttttatcttcaaggtggatgtgtgatcagttttcttggcatgattctagttgatgtttttttaactcaagttatctttgtggtggcggaattgtgtttactatgtagactgttttaagttcagtttcttgtgctgtaatcagcttatgaattctgctcaatccctgtttcagtgatgatcaatgacttcgtcaatgattttcctcatgtatttcctttgtgtaggcatatgcgcttattgcgaaaggagtgcggtttgtctgctctaacacgactgggaaaaacccaaagtctgttgtgctgaacacacaagggaggggttcacttaaagataatatcataacagttttcggcattagtacctttacaagtctacagcctgtaagtatatgtgtatcagaagattgtagagttgaagggtttctttccaagcctggacagggtactggacgcaatttagcagatcgacagtatttctttataaatggtcggcctgtagatatgccaaaagtcagcaagttggtgaatgagttatataaagatacaagttctcggaaatatccagttaccattctggattttattgtgcctggtggagcatgtgatttgaatgtcacgcccgataaaagaaaggtgttcttttctgacgagacttctgttatcggttctttgagggaaggtctgaacgagatatattcctccagtaatgcgtcttatattgttaataggttcgaggagaattcggagcaaccagataaggctggagtttcgtcgtttcagaagaaatcaaatcttttgtcagaagggatagttctggatgtcagttctaaaacaagactaggggaagctattgagaaagaaaatccatccttaagggaggttgaaattgataatagttcgccaatggagaagtttaagtttgagatcaaggcatgtgggacgaagaaaggggaaggttctttatcagtccatgatgtaactcaccttgacaagacacctagcaaaggtttgcctcagttaaatgtgactgagaaagttactgatgcaagtaaagacttgagcagccgctctagctttgcccagtcaactttgaatacttttgttaccatgggaaaaagaaaacatgaaaacataagcaccatcctctctgaaacacctgtcctcagaaaccaaacttctagttatcgtgtggagaaaagcaaatttgaagttcgtgccttagcttcaaggtgtctcgtggaaggcgatcaacttgatgatatggtcatctcaaaggaagatatgacaccaagcgaaagagattctgaactaggcaatcggatttctcctggaacacaagctgataatgttgaaagacatgagagagtaagtaggctattgtagttaaaaaaatgtcttagtaggatgctaattgtttgtggctatttcttttgttagtttatctcctaaaattactgttattcaaccactatatcatctacaggaacatgaaaagcctataaggtttgaagaaccaacatcagataacacactcaccaagggggatgtggaaagggtttcagaggacaatccacggtgcagtcagccactgcgatctgtggccacagtgctggattccccagctcagtcaaccggtcctaaaatgttttccacattagaatttagtttccaaaacctcaggacaaggaggttagagaggctgtcgagattgcagtccacaggttatgtatctaaatgtatgaatacgccacagcctaaaaagtaagatttctttccttcttcttttgtgtagtgtgtttctatttgcatttagagaaatgggattctttaaaatgacaactacgtctacaggtgctttgccgctgcaacattagagttatctcaaccggatgatgaagagcgaaaagcaagggctttagctgcagctacttctgagctggaaaggctttttcgaaaagaggatttcaggagaatgcaggttgctatctttttgactaagcgagcaccgaaagattgatagattaaaaaaatttcattctactctatcctggctcggtcgagaaatatatttatctgttttttctgtgtgataggtactcgggcaattcaatcttgggttcatcattgcaaaattggagcgagatctgttcattgtggatcaggtgagtcttcatatatgcatgcttccagagcccttttttcctccttcgatttgtttagttattggttgagttgtggaaaatggaagtttctatcatttcagagttcttccctagtctgatttttgaagaaatggtatagactagtgattgaattttatggccagcatgcagctgatgagaaattcaacttcgaacatttagcaaggtcaactgtcctgaaccagcaacccttactccagtgagtttctttgtgagatcaatctagattcttgatttcattacactgctttcactttttcacatcaaattccccggcggcattcttttatgtcccatgttactttagctatacttgaaccagtagtaatacctcttttccactactctatatgttacccatatttatctatttttttcctaaactcaggcctttgaacttggaactctctccagaagaagaagtaactgtgttaatgcacatggatattatcaggtgaaggatcaccattacttcttttgtaacattttcttattcttgctatcggtttggagattcaataatgtaacaactttccagggaaaatggctttcttctagaggagaatccaagtgctcctcccggaaaacactttagactacgagccattccttatagcaagaatatcacctttggagtcgaaggtagtttttctgtacctctgctgcatcaaatgtcttttgcattacatgttaatatttactttattgttttgggcagatcttaaagacctgatctcaactctaggagataaccatggggaatgttcggttgctagtagctacaaaaccagcaaaacagattcgatttgtccatcacgagtccgtgcaatgctagcatcccgagcatgcagatcatctgtgatgatcggagatccactcagaaaaaacgaaatgcagaaggtaaccaatgcttaccctaagataaacaacaatgtcccttgatagctaacgatggaatccatctctattaaattcaacttgaattgtaaaacacattcttctgcatatgttaacgcttttgtcatttgggttttggtcagatagtagaacacttggcagatctcgaatctccttggaattgcccacacggacgaccaacaatgcgtcatcttgtggacttgacaactttactcacattacctgatgacgacaatgtcaatgatgatgatgatgatgatgcaaccatctcattggcatgaacactcaaaagtcttaacgtatttagatgtgagaatccttaagattaacattgaggaacactcggttataactacaatcgtaaatgtaaattgtcttagtctatatgatctttttggtcacaacaggtaatttcattttcctttgattacttctcgtgaaaaaacaaattaacagttgtggttttccattgatttcaaaaattatctcaaattttggctaaaaaaagaaaaagaaaagagagatgcttcagaatcagaagagaacagtccacttaaaagtcttaaaccctaaaatgaaatccttccatctaaaacgcagtaaacgtcaccgtttgattcttcgtgacccacctaactacgatacactagcttgtagaggataaatgctccgagccctataaacacaaactatgtggagctactaaaggagaagtctttctctctcgatcaagccaagtaaaaaaaaaatcctaatctttgcgtcaccgttcgtgtttcctcttctctctagggttctccttcaacagttttccagtaaacatgaggtaacaaataagaaatcctttttctcttctctctagggatctttacctaaactcttcccttcgataaatcgtgcttctcagattcatttcgtgcttttgttgctttgttcacttcaatttttcatttttactcatgggtttctctgggaatcttggtttcttttttcaatcggttgatttagtgctacgctttcattggattcctgatgactgctgaaaaaaattttagggttttaaattggggttagggtttattgtgttgggtaccggaatttctctgtacattatagccagcaattgtttctgaatatatctgcatcaatctcttcttgtttagacctgaatcttagagcagttggatttagggtttagggtttatgtttgtgatagtaatgtgattgaagacatatttctgttaatgaagtttcagttttcagtgtagaatcaagtgacagtttcgtgtcttaggttttgtatacacatttgggtgtttctcttttgttatgtttttggtctaaaaggtgattgcttttcatgtattttacagtcgtcatcctgaagtgaagtgggctgagactaccgagaagattttcctcactgtagtattagctgatactaaggataccaaggttaacctagacccagaaggagtctttgatttctctgcgaaagttggtccagaaaaccacgtttatgagctcaaactggaacttgccgataaagtcaatgttgaggtgagaatttgtaggctgacttggtcttattgtttcatttgttacctgtttagttcttaaatcttttaacctttttcccttttaggaaagcaaaatcaacattggagagagaagcatattctgcataattgagaaagcagagccggaaaggtggaataagctactccgtgtgaagaagcccccacactatgtcaaggttgattgggacaagtgggttgatgaggacgatgaaggcagtgctggttagcattcatcttaacgcttatattatctgttcttgtgtacactctctgcactttatataaagttcaggatgtgttaacttatttgttttctatgttatgtttaggtgccgcagatatggatatggcaggaatggaaggaatgggaggaatgggaggcatgggcggcatgggaggaatgggtggaatgggaggaatgggtggaatgggaggaatggaaggaatggatttctcggtttgtttctaacttttgattgtccttcattttgtgcttcagatatacctagctctgagaaatgacctcatacttgatccttgcttcgtgcagaaattaatgggtggaatgggtggaatgggtggaatgggcggactcgaagggctcggtggaatgggaggcatgggtggaatgggaggcatgggtggtatgggaggcatggaagagtttgaagacagtgatgatgaaggtaatacttttgaagatctttctcgtttatgtttggtcacagcctccttgaaatgaaagcatttcgccagagttgattgactttgttattgaagtatctcatattccatatgatatgccaagtactctgtcttaggaaacattttgcagatttttgtgtttctttgttcctcaacaaaatgcagaattttgaagtaatgaaacattttctgtaaattgcagaagagacagcaaaatcaggagacaagaaggatgatgccgttaaggaggaaggtcttgcgacagagaaggcaccagcggcagaagaaacaacatctgttaaggaagacaagtgaagactctgttctagagatgatgaaaaaccatatggtattattagcttttcaggtttatgaaaccctctgaattacttcctcttttatatgaatgttgttggtactctgttttctttctatggatttgatcttggtttaagtttcttctaccttttgttttgggttatattgtttccaaatgttcttggacttgaaatttttggctttgacgtaagagtttatgcatttgaatcgaagtctaatatgttgtcaacattgaaacaaaacaaccacaatatgttgagccaattttcttcaaccattacttaaacattaaccagaatttgaaacacaatgacactattcctacaaatacatcaaacaagattgagacttgagaccgtggaagaagaatgaaagacctgtcctctctagtgagctatcaagtgtagagaggtaaagcagtccaagcaccagagacatgaccattctcacaaacataagctctcacaactggttcaccatcatcatgaaacccaaacactcttctcaaacaaaacgatgaatgcaaatcccaagtctcatcgcacaaacaaaacgcgcatttcaaacccgaggtcttactccgattaccgtcgtttatcgttctccaaactctagaccttttgaaatccttgaagactcctctaaacaacatgtaatttcgtttctcttctacgtgaatacacccaggccaattgcaaatgtagagacaatcacctcggaatctactcgcgagaagcttgttgccttgttcacggctaaggttccagccaccggaagctaaatgagatcctagagatcgacaaatcttccttcgtttccttaccggaagatctcgtccaggtctgatctcactcgtttcgatttcttcttcttgatcgtcgattgaatcttcgggaggaggagcgggaatagtatctgtgtagagatcatcatatagagaccaaaacgaagtcgtttctaaaccagatccaactggtttcgaaacttcttcgtcgttaagagctagatccgtcgtagtaggtttcggatcgaggttttgatcgggacctagctcacgttctaaaccgaaatcggagttttcgaggagaattccagcgtggaagagaccaggacaacaaacagcgagtttgtataaagaagcccaaccaccgggaggagtaagagacgaatccgccgcggtggatgaagaagcggatgcggcggcggagggaggaagagggaggagatcggagatgacggtggggatagcggagtagcactgagttttacaacaaacgtttcgaacaattgaggagaatttggtgcagacgcaagcgagacgagcccagtttcttggatcatcttggagcttgaagaagatgttgaagactacgtcttctggtatacaagagaagacagattccgccatggatcgccttcttctctctaggcggctcctttcttatccaaattcacttatactgttatgggtccggtacgcgtaaaccgggaatagtcttaactgttcttaaggtgggtcacagattcactaacacccacacaaaggcaagtaagtaatgcgcaacagctctcgaaaatgacatcgtacggactgaactaaaatgtaaagggtccgggtatcaaaatgagttcaatgcacatgtctttttaggttcatttattgtgaacgttttcaaaattttaatatcgaattgtgagcttttgaattaagtttggtattcgacagtaatttttgatagttcgttttaagcactaactatattagcaagtcatataaatcagctgagcttagctcataaactgatgatgactgagtatatatcattcccatgtgcaaacccaagctaataagaatgaaatacacaactagtttttcaacttctcatacataagagagatcatctttatgagaatcttccaacagacccagctttttacctgatatgagatgtttctttacctgtaaaacagttggaaagagattcagagaaagagtgagaatgttccaagcaagttaaaaagagtgtgcattaccgagatggactcctgcttctgctcttgctcctaccacggatagggctcagctgcttgctagggctcttacttgcttccttctgaacctgcaacacacacaattcaatccagatgatgagaatgtaattagctagacatagatcatgtcttttggatagtatggattgaaaaccgaaaatattgtgctgatagtatagcggagtaaaaagtgtattagagatagatgacttagagagggtagaggagatcttgaccttgaacgagatctgcaaaagtccgagaaacaaatccagttttaaaaatccaatatttccgtgtttaatagctgtttcaccaagacccttgatgcctcattccatgtcagacatcaaaacacaatcacaagaagcaaaaaagaaaaaaacatatcttcagactatttctagcagaaaatcaaaccaacacaagcctgcttttcgttaaaacagatggtagagatggagaatatcaaagcaaatctaattctatcaaaccctgtgtccagaacagcatcggttccatgagaatccagatcgcttgtcgattagcaggtaatgaaaatatctgtcctagctcgatgggtccattttgatgacactatatcaatgcgatccaatgtctctccactgttacccatctagcagcaatggatattatcagaaaacgaacttgcccatctaagaaagagcatatacctctgagacgaaacagttgtgtacaaccaaccaagacatccatgatccagatactatttcccatattttagttgattgtatgtatatccatatctaagaaacaaaaccattctcaacactataattataaaagaccagactttcaaaggaaataaatcgtgtacccttaactagaagcaatcatcattctcaatcaacaactcggagtcatcccagtgacatcttttaatgtgatgtcaccaaacttcaagggaagagctaaatagagcctatgttatgttttatgttggatattttagcataaacattatagaagaaatgaagcataccctcgtggagacagtgacctcgacttagagcgggagcgagagcgaggagatctcgatgtagattttgcaggcgatctacgcaaagatttagcctttggacttctgctcttgctcctgcttctgctgcggctacgactacggctgggactccgtccacggctgcggctcttagaataggatcttccacggctggggctcctcgaatccctccttgaatcatattctctaacctgtaatgacatagggaaatgttaagtgcaataaaaacgaatgcagctctcagaattcttgtctttaacatacccgaacatattcatgagaaaacgcattccgaaactctgtgtcatcgagctttttttatctggacaaaataaagaatataatcatgagtaatcaaggatgaacacattctcagccacagtcccacacagaaaatcaaataatatgaagaggaagaaaaacatctcaccgcatatttcatgtcctcgtagctggtataatctacaattccagttgtacctgtaaataaatagtccacgatatagattttttaaagcatgcacagactagttaaaacaggatttaaaggcagaaaacccaaacagctttagacacatctctattcttgggtaagacatgaggatttacctctaccatcacgaaacacttgagaaaaacaaacttctcctcctttacgcatgtgatccttcaaaacaaagtgatatgtcaacattcagaaatcgtagaaaatataggaacgacaatgaggaatctgtccacaactgtgtaatcaccttgaggtcttgccaggacgcagatgaaggcaaacctgacactacaactgtatagtggaaaatcttaatttagtgatttctcctaaaacttatgaatacactaaagctaaacatatcatatgtaccgcggtactctgatctcctagatggtccacgttcacgaccaccaccgtcaccaccaccacgaccgccacgaccacgaccactataactaccgcgtgcatcatgtgatgaacgcctcccaccatgagctagttccacctgcaatggccaacacacataaattatgtttggctaccagtcaacaatacaaagtttgtgtaaaaattctgaaatttgatgattaacaaacccgtaaatgatgcccatcaaagtcataaccatcacggccataaattgcatcatcagcatcacgagcatcctcaaactaaatcacatatatcacaaaacattagtggtagtatctcccaacatttgaaaactcatgaacactcaacaacaacgaagagcctaactgtaaaatcaacaacaagcctttataaaacatgtggttgcataaaaaatctgacctcgacgaatgcatagcctggaggcctcggcggaatcttcaaatcgatttgaacaacaggtccatacttcaaaaaaaataaggaagaacaattcttaaggaaacttcttccaaataaaatcagaatccaacaattccgaagatgcattcaatttctttcacatgcaaatcttgtaaagacatattcatcacataacacaaaattcgatcctgagttctgagttcttaaattaggagaaacgagtaatttaccttactgaacaagtcttcaacttctctttcacggatatcgccgggaaggttcccgacgtaaatcgttctactcgaacggctgctcatttatttctttcctataccaaaatcaaaattgagattcgaaacgtcaatagatcgaaacaaagaagcgatcacacacaaaaaaaactcattggataacgattaacctaaggaaaactaaagaggtttgattgatcgtctatatatgaactaaaattccagtaacgattccgatcacctgagagaaaattccgatggaagagaagaagaaaggcgaaaattgaaatctgactagggctttcgaataccatagagatcatcacgtgagtcacgtgaccgaccgggtacgtattaaaatacattgtgtcttgaccgtataaaatacatttgacccgttttgcaacaaatcgtaatcttcaatcaaaagctcttaaacccaaaagaacaactccaaatcttcactactcgatattctcaaagaacttgaaaacaacacagatccattcccaatttcagattcactcaaaaggatttttcttttttcattttcgctttttgtgatctggaaagttgttacctttaacaatgtctccgaaacatctagagtcatcacgaagctctattgaatcatgcacttcacagcttctctcatggcgaccatttcaccgctccaaaaccctagactcatctgaccaaccaccgcagaccaatgggtttcactcctttactcccaaacgcccttgcttctccgatcgatccacttctttcaccatcgaagctatgagccgtctctcactcgccgacgacgacaatggagggaagacattatcagcttccaattacagcaatagaggaagtttcaggttagtagcgaggaagcggcggcggcgtaattcgagatcggtgtctggtcggagtagtgatcggagtgggactcggagatgttgctccattggtgctcatgggacttgttcggatttgcctttcgctgttggtacagattcaagtggagagctttttggtgaagcgaattgggcttctgatgtgagtgaggcggcgaggaattcacggagagagcggcgagattctggtggagagaaggaagcttctggtggatttggatttgctaatggagttgatccaatggggaatgaatctgggtatgggagtgagcctggttacagaggtgatgctgagtttggctatggtgatgaatttgatgatgaagaagaagatgtcaagccattgttttggggaggtattaaattcagagactttttatagcaattgtgttccatcttgagattcgtggtttttgctatgaagatttggagattgatcatcattgattagattaaagatgacaactttagtgttatttcttctgatgaaaatgagtctgattttgctctgcttgtctattatggcattgcctcataggaattgtcagaaagttgtcaaatttgggttagggaatgaaataatgattgtacattgtggaattgggttcttatcatgttaggtcattgtctgaaatggatatgtatgtacttggtattttgatatgtttagtgattggtgagtgttttggatttggagcagatacagattcaacaatggggatgtctggtgagacgaaattctcagatagtaaacctcaattcaggtgccggcgaagaagacaacatgactacaaaactgttgactccatgagatgaacataacaaagacattactattcagttattcagtaatgtctccatgagatgatgaacataacaaaactgttgactccatgctcatccaccctcatgatgatccgcagacattcttaccgagttgtttacagataccaagagaagaggtcttattggagaaacgttaatatgtatttgtcctaacacctgaaactgtaaagagctttgtcaaacattttttttatagaaaaatctgtgccctttttttggtgatatggatgtctcaaagattcgacgatctggagaaagatttacgaaaaccacaatgcgtgtatagctgcacaaaagaccattccgtttacggaaaccaagttggtgaccttcatttgggactctgtcgcggagagtatatgtagacaaatgtaactaaaaaagacaactatgattgttactcttgctcctttattatatgaatcagaatatgacacaattatttgcaattgatggaagttaaaagaaagacttagtcatgactctctgtccttgtgcaaatagaatgccgtagtcacgagggtgaacaattattattttttccggatagagacttgatagtacaattgtggtccgaattaaaaccaagataatagatggaagtttgtctaccacaaaatagttttgactaaaaacaaaagaatgaaagttaggtgcggtactaataccactattgtggttcggatcaaaaccaaaacgtgatttgataccaaatgattaaatcccaaaccttaacacaatggaaaacagagtagtgacacattgtttttgcaattagatttagttatggctatcgtttactaactcatcagcttcactcaatagtgacttacacataatgagatgatacacgttgtacatctctaatcaaagcctctattaatgtgagacaagataagttacaccggagacaaacacacgttgtaccacaacattacaaattgaaaacctttatgatccgtcattcatcttcgtgagtctctaccatgacctctaatataggttaagccgaaacgacttttcccttgaccaatacaaaaaatgacttttccacactctccataaattttctttacaaactcaaatacctaaaccaaagccaacaaaaataaaataaaactcttcaccatgttcttcatcaagctcttcaccatcttcttcttaagcttcttttggcaatccctaaagtcctcttcccaaattatcgacttcacttacaatggcttccgtcctccaccgacagacatatccatcctaggaattgccaccatcacaccaaacggtctcttaaagctaaccaacacaaccatgcagagcaccggtcacgccttctataccaaaccaatccggttcaaagattctccaaacggtaccgtatcgtctttctccactacctttgtcttcgctattcactctcagatacccattgcacacggcatggcctttgtcatcgctcctaaccctcgcctcccattcggcagccccttacaatacctcggtctcttcaatgtaacaaacaacggtaacgttaggaaccatgtattcgctgtcgaacttgacacgattatgaatatcgagttcaatgatacgaacaataaccatgttggaatcgatatcaatagcttgaactcggtgaaaagttctcctgctgggtactgggacgagaacgatcagtttcacaatctgactttgatcagtagtaaacggatgcaggtttgggtcgatttcgatggtcccacccatctaatcgatgtaaccatggctccgtttggtgaggttaaacctaggaaaccgcttgtttctatcgtcagagatctgtcctctgttcttttgcaagatatgttcgtaggtttctcgtctgcgaccggtaatattgtgtccgaaatttttgttcttgggtggagttttggagtgaatggggaagctcagccattggccttatcgaaacttccgagattgccggtgtgggacttaaaacctacaagagtctacagattctacaagaactgggtgccgttgatctccctcttgttgattcccttcttgcttataatcttcctcgtgcgcttcatcatgaagaggagaagaaagttcgcggaggaggtggaagattgggaaacagagttcgggaagaaccgactaaggttcaaggacttgtactatgcaacaaaagggttcaaggataagaacattcttggatcaggcgggttcgggagtgtttacaaaggtatcatgcccaagacgaagaaggagattgccgtgaaaagagtctcgaacgaatctagacaaggtttgaaagagttcgtggctgagatcgtgagtattggacagatgagtcaccggaacttggttcctctcgtgggttattgccgtcggagagacgagcttcttctggtgtacgattacatgcccaatggaagtttagacaagtatttgtacaatagtccagaggtaaccctcgattggaaacagaggtttaaagtcattaatggcgtggcctctgccttattttatctccacgaggagtgggaacaagtggtgattcaccgcgacgtcaaagccagcaacgtcttgttagatgcagagctcaatgggagactcggggatttcggtttagctcagttgtgtgatcacgggtctgatcctcaaactacgcgtgtagttggaacttggggatacctagcccccgatcacatcaggacaggacgggccacaaccactactgatgtttttgcatttggggtgctcctactagaagtggcgtgcggcagacgtcctatcgagattaataaccaaagtggtgagagggtcgtgctcgtggattgggtttttagattttggatggaggcaaacattttggatgctaaggatcctaatctagggtctgagtatgaccaaaaagaagtcgaaatggttttgaagctaggtttgttgtgctctcactccgacccactagctagaccaacaatgagacaagtgctacagtatctaaggggagatgcaatgttaccagatctgtcgccgttggacttgcgtgggagtgggatcatgttgggaacccacaacgggtctaatgagtcgggcatgtttaccagtggatcttctgttgcttattctctactctccagtgggaggtgattttcgtataccataacgtttgtagaaagcaattatctgcaaaagatagaggaccatgaactcaaacgtgaaatatttgaaactctaacgtttagttttattgttgctgcattgaaagtgtatggttatcgaagtataattatgtatcacatggcttttcgattaatagtgtttcctaagagcatgtccattgcagagaccttacaagtttcttaagagaatcctaatgaaaagaagcaaaaaaataaattaaaattgtctaattaaccaaggtgcgaaccttaaataaggtatttttgggtgagtaaggttcgctgacgtggcactatatcattggaggaccaataaaacaaaataagtttttttccttttttctttctctcctctctcttggtttcgtatagagtttctgggctttggtttatgttcaaatttgtgtttgatctgttggtttttaagataaaaatgtgacccttttgctgcttattcacttctcattagcattacaacggattggtgacacaaaataattggttctaggtttatgtttatgctcttttgtttgctcatttagttggtgttatcaaataattggttctaggtacgtgctttcatttaagttcatgacagtgtcttgagctggagatagattattctatgttcttcctttggtgacaatttcattaatagacctctcatcttggactttagtttcctcttgtaagccttttgatttgtattctttttctttttttttttgcttttatgtcatcatatatgtttacaatttgtaatattttttaataacttttaagttttatcaaataaattattttaaaaatatttttgctttttaaaaaaattttcataaggactccaccattggataacaaaaaatttagagactcaacaaaaactctaaactttaaaattaccaaaatatattattaaaaaatgttaaggattttttataaggattcaatcaatgggcatgctctaagacttttaaatatttagagatattttttcttggctgatatattgtcctaaaacacataagtcacaaaatgataggttaatttcactatatcatataaatctcatagagtttcactatttcaaactatttttacatattgtgtgtacactttaagaatatgattgctacaaatttggcgttaatattttagattaatggtcgctaacaccaacttgtctcccaaatttagagttgaattcaatggcaataaaatagacataatttaatcacggaaagagatatcaataaactaataagattatatattacattaaaaatatatgtaaatataattagaagcgataaaaattacaaaattatcaagtgattattactttattagtctagtgatagtgagtagtgagtttcttgaaagagtacaaaaacattgacaataatgctttcggattatttttgaaagaaatagtctaaagacggcatctagatcaaatggatatcataaacttttgatccgaatgttgcggttatcaaaaaagaaatgacaatagtataaaatatggtagaagtattgtctatccttatttcttaagcaaaaatgatctctattttatgaacaactagcaataaagaaaatgtggaaaacagatgataagttactctggttcctatattatatgaaacagagtagtgacaccattatttggaattcatggaaattaaaagaaaagactcggtctctttgaattagtcatgactatccttgtgcagatattaaaatgcctgacggtgaacaatttttttcaagttattttatactacgtgtgtggtcaaaatcaaaaccaaaatcactttttgataccacaaagtaatttgaaatatgcttttgctcttttgttataggaaacagagtagtaacaccattacatgcagttaacaaaaatcaaaagaaacacttagtctctttggttttgttatgactatggtttgtttttttgtcagcttcactaaataagacaagagacaatacacgtagtagttgtaccacaacatcattaccaatcaaagcctttctgtctttgtcttcgtgagtctccacaccatgacttctaatttggggtaaactacgacttttcctttgaccaacaaactacgacttttctacactctctttacaccatatattattactcttattttcattacaaactcaataatatctaaaccaaaagccaaaacacacaaaaacagagccatgttcttcaagctctttaccatcttcttcttcttcatcatcctactctctaaacccctaaactcctcttctcaaagtctcaacttcacttacaatagcttccatcgtccaccaactaacatatccatccaaggaattgccacagtcacatccaacggtatcttgaagctaacagacaaaacggttataagtacaggtcacgctttctacaccgaaccaatccggtttaaagattcaccaaacgatactgtctcgtccttctcaacaaccttcgtcatcggtatctactctgggatcccgacaattagcggccatggcatggcctttttcatcgctcctaaccccgtcctctcatcagccatggctagccaataccttggtctcttcagcagcaccaacaacggtaacgatacgaatcatatactcgctgtcgaatttgatacgatcatgaaccctgagtttgatgatacgaacgataaccatgtgggaatcaatataaatagtttgacctcggttaaaagctcgctggttgggtattgggatgagatcaatcagtttaataatctgactttgataagtcgtaaacggatgcaagtttgggttgactatgatgatcgtactaatcaaatcgatgtaactatggctccgtttggtgaggttaaacctaggaaagcgcttgtttctgttgttagagatctatcttctgttttcttgcaagacatgtacttaggtttctcggctgcgactggttatgttctgtcagaacattttgtttttgggtggagtttcatggtgaaagggaagacagctccgccgttgactttatcgaaagttccgaagtttccgagggtcgggccaacgagtttacagaggttttataagaacaggatgccgttattttccctcttgttgattccggtcttgtttgttgtctcgctcatcttcctcgtgcgctttatcgtgaggaggaggagaaagttcgcggaggagttcgaagattgggaaacagagtttgggaagaaccggttaaggtttaaggacttgtactatgctacaaaagggttcaaggataaggaccttcttggatcgggtgggtttggtagggtttatagaggtgtcatgccgacaacgaagaaagagatcgcggtgaagagagtgtcgaatgaatctcgacaagggttgaaagagtttgttgctgagattgtgagtattggtaggatgagtcatcggaacttagttcctctcttgggttattgtcgtcgtagagacgagcttcttttggtgtatgattacatgcctaatggtagcttagacaagtatttgtacgattgtcctgaggtaacacttgattggaaacagaggtttaatgtaattataggtgtggcctctggcttattctatctccacgaggaatgggaacaagtggtgattcaccgcgacatcaaagccagcaacgttttgttagacgcggagtacaacggaagactcggggattttggtttagctcggttgtgcgatcacggttcggatcctcaaactacgcgtgttgttggaacttggggatacctagccccggatcatgtcagaacaggacgggccacaaccgctactgatgtttttgcgtttggggtgctcctactagaagtggcttgcggtaggcgacctatagagattgagatcgagagtgatgagagcgtgttgctagtggattcggtttttggtttttggatagagggaaacatcttggatgctacggatccgaatctaggatcggtctatgaccaaagagaagtcgaaacggtattgaagctagggttgttatgctctcactccgacccacaagttagaccaacaatgagacaagtgctacagtatctaaggggagatgcaacgttaccagatttgtcgccgttggacttccgtgggagtgggaaaatgttgggaatgaaccacagatttagtgagtcatgcacattttccagtggatcttcgattgcttattctatagtctctggcgggaggtgattttggaatattagaacatgtatatgtcttacatagttacattacatatgtagaaagaatgtttttgcacatgatagagaccatgttgatatatatcattgaaactttattgaccggtttacgactttatgatgttgtattgttgtatttcaaagtagaggtggttgataagacttggttatagaagtataattttgtaaacacaaagcttggagagtccttcagatgaatataaataagctagagatctttgacattatacattgtgaaatttcccaagtaatacaagtacaacatgactacaaaactgttgatctgatggtttatgaacatgaatcatatggctaaccggtggttactgggttaaccgaagactacttgaaccggagttggtttgagaattacaaaaaaattatgatctacttgaaacctctggttccgtcagaggtgttagcttcgtcttcattcaaaaagtcagcgatatcattacggatgcagagtctatgtgctcctcctcctgtacactttccggccaccgcaatccgtcgctgtcgaactccgacgctcgccgttcgttccttacgagcagagaatgagccttcgattcaatcagctttagtttcagcgtctcatcgtctgcgagaaaccaatcgaacaggtaagcaatttctgtctttttctactcaaaagagttcatttttcaatttctataagatcatcccagcaaattctcctggaaaccgttgattactgtgtcttgactttctcttaggcatttcgtcgaacacataccaatatagcttgatcaaatagtttcttgaagaaatttgactaaaagctttctaatttccgcacgcagagcctcttttcatcgacccgtatgccgcttgtttcttacctccttacacaaagaaggatttggacatccatgaacaacaacaacattactgtcttgcaacaaagttcatcgatgataagttgttagaaatagctaaacgcattgatgggctaaagcaggttacttttagttacttctactgtcagagtttgagaattatacagtgaaagttaaattgtttatgtgcaagtgatatcatatctttgcaggttgtattgttcacagatgggatggatactcgaccttataggcttaattggccaacttccactatgatctttgatgtatcaccggaaaaagttttcgaaatagcatctgaaaagcttcaaggtttgtgctttcctttgcgttgaagcgtccattttgattacaaacttaatttcccgggacttgaatgctccctagttttgtttgggactgttaaaacgttccaagggttagatattgtttctttaactgatccaggcgtgggagctaggatccctaaaagttgcttattctttcacattcccgtggaattcgagaacatagagcaacgtttacgctcaaaagggtttagtgggaatcggcctagtatatgggcaatgcaggtatatgagttattcatcaaacctctcttcttccaggcaatttacatgatgttgacatgattttttttatttatcacagggcttacctttggagtcacaatcaggttttgaagctattctatcggccattagtagcttggccatgaatgaatgctatctcataggagaattgcctacaaatataacactacaggtcactttgatctcttgactatctttggacttctaccttaaaagcatctattctttggtttgtaaattgttatctatatgtggtgatgagtgcagtcggatttgtcaaagtggatggagaaactgttcatgagcaatggttttcgggtgaaaatagttagctatgaagagattgctgcaagtttaggtgtggtattacattcaccagtaaaccatgacacggttctctttatcgcacaacagctcaagttttcagatgatcaggtaatgaatgtcacaactggctaggtctccattattacttatcaactcagtggattgtgaaattcttgcagatggagacatggagacaagaatttcaaagagtagaagaagatggagatgaacaaggatttgaagagctctgatgaagcaaacaaaatgtttcttttataaataagacaaattacaaagcaaaactgttttcttttggatcaaaatttgtgtctaaacaagttttgagaatacagaaatcttgagagctaagctttggtctttagcttggacttgtttttgccttgacctttactggttttactaccctttttgggtctttgtttttgatggcttcgagggttttcgtcatctgctttctcgtttggattcacttcctcaaatttgaccggtttaattatcacaccagctttcttcacaacctgcacacaaaaaggttatacgaggtcaaaagaaaggtaacattttaatacatggtgcaatgagtttaacaaataataaaaaggaacctcgggtcggttgagagctccaacaatagtcgcaggattaaactcgggtcctataggcatgcgcatgctgtgttcgaaaacttccttagatgtatatgggaaaggtagagtcgttgtatgaagtttgtcagcctgtcaaaaacagataatgtgagcatgaagggatgattacgaatagagggatcgggatatcaagcgagacactaacctttttatcgactttctctgatatgataacatttctgagacgatagtctttccttgttttgagatctagctttctctttttatttgcatcttcatgttctctaaccatccatgaaggtaaacctctcttcttttggacattggtccattgtccccaaccaggaactagaaccggcttttccggttcaggaacttcctgatttagaacttcttgcttatccttctcaaattcttctacaacgtcatcaccagcaaaagcacgttgtataagctctgcttgagaagggatttcataggtctccttcgaagcagatgtcaaaatcccatcaaccatttgctcagcttcactctctgaatcttcactttcttcatctctcgattccttcaatgcaaagaagtgaggagaagaaaaggataaaacaaaaggtaggtgaagttttaagaaatgaaacctttttatcttggccctttgagattggtacacgagtctttggagcttttttggattctgcattttgggagcctttcatctacacaacatagaaaaacaagttaatcaaagataaacataaacggaaaccaagtctgatttgaaaattgtcaaagcaaaccttcttccaagagcctgacgcaaataaggcaacatcaaatgttgtcttagaagctggattttcaacatcaccacaacacttctacaaacaaaaaaattgttgtcagggagttgataaggagcaaagagagaaccattgtgattaatcgaacaggaaaaccaatgatacctcggtctctgttatggctccagtgtttctagcaggtgaagcagtatctccaacagccccaaggtcattattttctataccttccatatcattgtcactatcactgttgtcataaaaattgtccgagtcctttttagactcttttggagcttcgactttagaggtggcaccaaatactcttctaccactaacatcagcggattttttaggattatcttctccaccaaaattctccaattctttatactccccaaatgcacgtttagcttcttcattagcttcctcatttttctttttcatagcacgagcctaatcaaataaaaaacatcagacagagtctaacgaatgaaggaaatccaaagtaagataatcaaaaatgctttgaggaagtaaagcaagaattaccatgaaaggtaatgaaagaagaccagaattgggtacatcatcatcttccatagttttcagtgtcttctccctggctttcgctatcaatttagaaggagtatcctgatctgaaccacaactcaactcttcctcatcgtcgctctcatcactactacttccatcgttcgtggagttcatctttctggacaaagtagcattaatctgaagttgttcagatatagctgccctagttccatcatatctctcagtcagtccacggcttaacatgcgtttggcccattttcctgtgtttttgtgcttcaaagtcatccgttccttcatgaccgcaaacaagactattgtattactcgacagtgtcttgatgagaaattttgtgcaggtagaagaaattttagactcacctctactcgtctagtctcctgcttaatagcctcttctttagccatttctgggtccattaatgctcccatcgctgatttcttcaggtccttccctttaaggcgatgataagttttagacttaatcttcttgatacgtttacttttcagttcatggcggaatagcaggctccgcatcttggcaatgtggtcacggtacttgatgtggtcttccatcgacacctgccagatcaagttaatcgaaaaggttacatcagatatataaactatcttcaaggcaaccaaagccaggttttattataagtcaaataagctgtgtgcaggaaaaaactagagcacagaacttgcctcattcaattcaagaagcttagcgccatcttctttgtgagcctccccaagctcgttatctttgagtacagaagccattttcttctcaaattcagtcctgggttgaaactctgatgctattgcaccgactgtagaatacccaacattgacaggttgattaaagtaaacagttggtgcctccctattcctcttgaccagatgcacccacttattaaagtccttctcaactagtcctttcacagctttccgctctagtctttctcgttctggcttaggcaaaggtgcatgaacaacagactgagtatctttctgcatccggttgatcctcttatttagatcgttaaacccaggttttccttcaagaggcgccaaaaggtcctcaactgagatgaggcctttaccctccagaacatcacgggtaggattgaattcagactctggatacgcttcagtatagagtacaggtctcttcttactctcttctgtaaacaaaaaaaaaaaaaacttcaagaaatgcaatgaacagaaaagctaatagcaaaaatctgagaagaaagactcagtctttaccttgaaaggcagcacttggcattccagtgagaccttgcaacatccgtgtgtgtctatcgtcatcaccttcaccttcctcattctcgctgtttccaccatcttcatcatcatctgactccacattttcatcctatattgagatcatagacacttttatcaataagacatacatataacaaggacaaaacaattgccaagaccagatctaaagttactatctcattaccaatcaatcaattaaaaactctcaattttggattcaccaatttgttatagcgtaagaatcccgatagcaaaaaccctaattgagctaaaaccaaaatctgtagattatcttcttatcactaaagttcaaaacttgcaatttcacacagtggcggagaattagtgaagagaaagaataaaacctcgaaatcctcgggaagctcgtagtcgtagttatcgacgcggtcatagcgattgtttttcttagactcttcctcaggcacaccttcttcatactcatacaaatcgacgttttcatcgtcggaatcgatctcatcgtcatcttcgtcagagttcaaaggacgtttctcattggcaatagtcttcaggattgaattaggcaaatgaggacctttcctcttcttgttcttagctagggttttcgaagtagattttctcttttctcccatggctgcctctgcttttttttttttttgccgtttagtttccgattgagattttcgtagggtttcttctctttcgcttaaatactaataaaatcgagtttcagagaataagaatttctcaatcataccaactaaaccggataaaattgggtatggtttgcggtttagcgtaccaatatacgagtgaaccgtgcaaaatcagagatgaaggagtttgaaagaaatacaataaaacgctgatttttggataattagttgatgttcaaaagctaatatacataagttttagtgcttgtagttgaatttgacttggatcacataacgcatcttgatttgttccacattgtagactatatattcgttgtacaacaacatcccctgcaaaagttatataaagtcagtttatgaaatttgagagagttagattttgtgaatgtgtgttgaagcaagacaaaaacaaaaaccttggagcatgaacgttccactggtttgccaagtggaacaacaacaccgtcttctagtgtttgagcctctgatgggtttggtgctgttttccccacaccttttgtgctgcaaccatcaaataacaaatcaaggtacagtacaaaaatagtaaatcataattcattgcggtttgagataaggaacttgtgtgaaatatgaatgagattatcttcataccttagctttcccgggggtagattatccgcgttataatctgaatacagaagttcattcatgtctcccaaagcaacctagagaagtttttatcgttaggaaacataaggatagttatgttgaatggctatagaggtcctgtagttatacagtagttttgttgttttctatatgaatagagacaagaagcgagtatacctcgcagaggagcagaacgccatcattagcgccagtgttggcatagcaatagttcgcactcttggagaacatatccgcaaagtaaaccccttttccaaacatgtaaccagttacaggcgcttcaggaggagctattcgcagacctgcttggtgtctcatagttgttcattttactatgcaattgaaaatcccccaagaggagaagaaaaaaagtagttactaagaggaaaaagagtaacatgttaccttgagataaaataccagcccagttagtgagacgtgaaccgtgccagagtagcatcctgttcttcgaacttgaaaactgccaagaaaaattaaagtctcacaatgccaaaaacgagaaatcagaataatgtgtatggtactgacaagctcgaaataccataacatacctgttggaatcgatcagcttcaacagctctcgaagctctaaatagttgagcaatctcaaccgtatatcccgaatgcgtctttgcatgagtgttctccatgtaattagcaacctgattttggttttaaggagtaaacaccaaaaggtttaaaacacagacatgtttgagatgctcgagtatcaaagatatttgttcaaagttcacaaaaccgaaaatttaccatagagaactcctctgaatcatttcctactggcgtcaaaccacaattaagttgctggtagtgataatataaaggatcatcctacagccattgcaaaaaataatgtcatattcttagagaactatacgacggagtgatttcatgccttcaaaccacatagactgactgaattacctgcaatcccgggtcgacggacaacaactttgttgcgagttcaatctcacctaatgcttcaaccttacaaaaaaacgatatattaaaaactacacaaaacatgtagcgacaaaccattgcttttctgaagaccaaaactagtcaagtaaggaaacagtaggaaaaattaccatttcaattttctgtttcaacttttgaggagtgtctataacaaactggcctgttacagctcggaattcagatgttagtgaatgtttagttatatatatcgtaaaccttagcacagatgaacttactcattttcttaaaaccaaaatcatgaggtatcactgtgtagaactctctgcatcaatgataaacaaagttagactagttcaaatctaatttctttatgggaaacagttacataatcaactaaatgcgaaaaattgtctagcaattaaccagatacatacccactcagttcctcaagcctcgttctatcataccgatcaatcacctccgatattctcttcagcacttcataaccctagacatgtggaagaggagattatatcatctgaaatcacaccaaactataatttacggaaatgagaccaaacagactgtttactatctttacctttgaaattgtggacttgcttatcttgccgagtggcaatttgttagcgttatatccttcaattccaaatttagaagatgtatgaaaaatcagcaagaagtaaagaaaccagcaaaatggcaaacaaatggataggacaaaagataggaagtacaaacgcaggtaataggacaccaaaacaaagagataatgtatcgacatataaaaatcactgttaatctgccaatggatgctctcacttgaatgaagtgatcaaagttagactcaaacctatttccatcatatgctgtgccatcatgctgacattacatataagagagatgaacttggcaacccgagtatctagttttgattgttcaggtttaacttcggaagatgaactcggaatatcattattgacctgagaaaaaaaacaatcgtgaactctgagtaaagtgcacatttgaacgaagagaaaaaaaatatataattgcaattaaacgggaaaaagaaaagtagatatgcactcaaaaacctcattccagcagatcccttggatcataccacacaacaaatagtaagaagagaaagagaagtgaggattccaaaacactcaccggtgaatcattttcctcttttccgtaatccatttcgagccatgtataggacttgggatgtgggataaactcctttctgtcagaccaataattctttgtcttgtcattgaacttattggtaaatatctctatcgcacgatcccatgagtcataaggcccatctagcttactttgtcctttcacaccaactcttccccatctggtgtaaaccatgtatgtctttttactatccgactctgcacaatgcacaatagataagatagatcaatgatgatagtatctggaaccaagaagaatgacaaagagtcatcaaaagctgcttcaagaggtttccagtactcgaacaagacaagtatcgtctcattaatcttggaaagtaaccagggaaattattgttgaaggttttggaagactgacctaggacttgtaggacaaagaacttgttattattatccctgacatttgtctgatttaagatagcatcataaacatcatcaccctacaacattcaacaaaaaaagaaacagtttctaacaacattcatgaacacgataagatgcaaaaactcaagattaggttccaaatcctcaccctttgtagaacatggtactgactctttatctcatcaggaatccactgatctaacaccgctgcacccttctttgtcgcggttacgattttctcttctttcttttcttcttcaaagccattgttgtcatcttcagcttcatctgtcccttaatacacaatgacaataacaacattaaaaagactcaatttttaccaaatttctcaatagtccagagaattgaacaaaccattactggatttgactggtgcattggaaacgttattagcatcattgcaaagcctctcaagaagatcctttttggttcctgttgtatctaagcctctcttaatagcttcctcacgcaattccttcacaatcatcccacgaaattcgccaattgcaatcaatttgttcgattcataagtatcattagaagaatttcttttcctcttgctctttgattcttccttcttagtgtcttctgcgatagcctcttcaagcctctccacctacacgaaacacccaataaacaaattcgaatatcaacaaaatagaaagagtatttcaatgcaattcagagaaataccagaacggctttgactccagtagtactgagtccacgctcggcgagttttaaacggagttcgtcgactttgagcttgttcgccattttcgtcttcttcttcaggagaatagttcgtcggaaagggaatgagactgaggaagtatggttttcgtcagaagtgagttcgcgcgagcatttgaagagtcttcttcttcgttttcttcttcatcgatggcttcccttgaaagctttagggctttttgaaaaattattttaaatttttttgacaaaagttctcgttcatatttgtggatatttcccatataactttttaatctccaaaagaccccaaacttttggattgattcttaaatccacccctgacctttttaaaatagtatttatttcctaccattgatgatggcaagcaatagaaaatcatgaaagataaaaaaaaaaaggttaaaaatctagtaacaggcaaatactttgaaaaggagttgaaattttgtacataggtttaactcttctattaaaagaaacaaaaaatctctatgttttaaaatgtactactaatttataatttaagaacatttttctgaaaattttgctggttgtttaacgaaaagaaaaatatacaaatagtttttggctgtaatgctacgccactactcacttttccaaggacgtgcatacaaattaccgtaaacggattataggacttgtgttgactaatgacacaattcttttttattaaaagagattagtctccttgaagaaaaagggacacaaattattcgtaacatgttaatcaaaccaaggtcttaagtggctaccaaccgcatacgagtgttgagccgagcagtgctgtgtcgagccgggctggatttggcatttggaatatatgaaatgggccaacaacccaaaagataaaatttcgttacttggacagtaaaaactaaacatgcatgtttattagcccgtaatctgcataatcacaacttacgaagaagacataagaatcaacaggcccatcataaagtgggactaacgatttggtttccactattatttggcccatatattgttaatattgtacacttcaaatattatttagttagaaaaaaaaaaaaaaaaactcttgtaaaactggatggttctagtttagttttaaaaaatggttagatgataacgatattaatatacgataaagtttatataaaatatcttttcataaccaaatttacatgacaactaacattcgggtaagccatgtaaaagacgagatagagattttgaccaaagaagaaaagtagagagaacatgcaaaagccaaaaagaaaacatagccaaatggttgagtggtgtagatggaccgaaccaacagacatgttctcagttcatataccaaccgcctaacattacagcctgtccccatcccctatctttatttttctttttggctcatttagcttcaactttttttaataggtgtgattagaacatactaaaaaaaacatatgttttaacttatattatatgaataaagtgttgtttttaatagtttatatttctattacaagtacaatatataggatattttggttaacaattttaaatttaaaagatattgtgagtacaaatcattaagcttaacacaaatgttcattgcttcttaattcttacaatcggaaaatttggacaaaaaatctagactaatctccaaaacattgtgaaaaattgggggttttttttatcatttaaattgtctatagtggtcaatcattattaaaaaaaattgttttttgttgaaattttaaattataaaaaaaaaacacgtttatacataaaatgcaaaaacttttcttaaaccaaattacagagaaaggctatcaccatccttgtcttgatgccaaccacacttgtaatcccaaaatacatacttaaactatactatactaacatgaattggttatacgattatctatctagttagctacataattcatataattagttttttaaaatatacttatgtaatgatagtaactaaaaaatatactatctcgagaaatccaaccaaaatgctatgatagtatataaaataaaatgaaagaaagaggaaccaagttgtgaaaccatttaccaagaagaagaagaaaaaaacaagatggtcgagtctcgtgatagtatgaagctggggccgaaaccacgaatcaaagaaccatttgacgatgcaagtggtcatcgataaccaatcaatagaaactccaccgcctcaaaatatcatagtgctatttaatttttcatactatcatttattgtaggctataacatatttttgtattgtagatggacggctagtacacgcaagttagtcaataaacttttaacaaatggcatcttgacatgcttaaacacattttataattcgaacctcactttgcctactttacacacgtctacttatagtagatgagcatcaatcattgaaccgttcgtataatacaattttttttttgtaatacgttataattagaaagtaatggaaaataagttgaaacacaaattttcaacggttttactaagatttaattttacaattttcaaaatataaccgaattatttaaatcgtattaaatttataattaattttctaaaaaaaaacacagattaaaaaaatatattaaaactaatcataaatatattaatttttgtaatttatatttttttataactttaaactaataatattcaattatttatcttaaagtttacaaattatcaataataactaataaataatgcataaaaactttttaaaaattaactttttgaaacaaatttttttctaaaaaattaaataataaagaacagaaaaaatattattcaactaaaaatattggataataactctgaaagtttgcatttttcaaataaatcattgattttttttgtttgacataaaacattaatttccccttgtaaatcacacatttaaaatctaactatatttaaacaaaaaaaaaaagtccaattttgactttaattatataaaaaaagcaaagctaattatgggtcaaaagactcaaaggccagaattgacgcagccgtttatgagaagtgagaagacaatttcggagtcacttcctttatttcctctcttccttcactctctcctatataaaccttcctctcctcttcctctcttctcatctcttcaaaccattttcgaaagccttgagagagagaacacagacgataccaactttcttcaatctcgttgccgcagtataattatctcattcctcggatatatctctccttctgcggcggcgacaagaagctacaagaataaaaagtctgttttctctcttttcaagaaaccacttacttcgaaaatggctcgttctatctctaacgttaagatcgtatctgctttcgtctctcgtgaactctccaatgctatcttccggtaagtctctattgttctgttttctactttatgctctgtttttttcttgtagttatgctctgtttttttctaaacggtgtcgttttttgtgtgataacagacgtggttatgcggccacggcggcgcaagggagcgtttcgagcggtggaagaagtggagctgttgcttcggctgtgatgaagaagaagggagtggaagaatcaacccagaagatttcttgggttccagatcccaaaaccggttattacagacccgaaaccggttccaacgagattgacgcggctgagctacgagcagctctcttgaacaacaagcagtgattgattattattacatgtaattttgtcaaggtctttaagaggagattagtgggtaatgatctggtgcagtgaaccctattttcatatgttaagtgcggttctgtaatgaataaaatagagaagcgtttggtttcctctaattgtaacaaaaggatcgttggatgtatgatagagtttttcttataaaaccatttcagaacttcttaactgattacagaattctgattatagaattctgtatgataaatttattgcttaacgtttgtacaaacgtcctatatgacaaaaccattattggttattttgattcagaatcataatgtaactataggtgatgagtaggtatgataattttctttgtatcgttccaatttgattggcatacgaaaatgttcaaatatcgtatgtgtgttttttataattataatctaattaacgtatgagataacgtattaaaaggaatgtaatgatgaacaattggacttttaaaaaatattggcatatagcataagcatagataagcattaggaattcatggtagtggatcaacatataaagcttcttaattatatggttttgttccttgcatggatataaccgacagaatcatgtctcttgactcttggttactactaattgttagtagtaatagattataattagtggcagtgcatttagcaacaggtacttgacatagaaatcatttaataatgtagttaattaacttaaatcagtttttaaagacatgttttgtacctctggagtttcgaccgttcctgttactatattttatactacaagtgtatgttaggttaataggtttagtagacatcttaagttgaactcttcgtgtccatctctaatcacacattgatcaatgattacaaaatattttagttatttagttactttctttagtgagggtaaactattaaatctttgtcttagtgaagtatttatttcacacgtctaaatgagacccaaagatcaaaccacacttttgattctctcttcttctctttttctgtcctgaatcctgatcctcttattcattccttttttgttttcattcttacacaaggtatatggagaaaaggaacaaaaactatttcttatgtttttggaaaattaattcaatcatcattgataaaataatttcaaaactagtatttaacaatatctaatctatatgaatatatttggataaatccattttcaaattaaaacctaagaaaaaagagatatttgaaggcgaagtaaaagaattcaaaagggcaaagaaacataagacgtgtcctgtcttcttttgaagagtcaattatgctcaaaggctttgagacttgagggagacttattgacagagggcaacttggtgcatcgaatctattagcattgaattttcttttacttgactataaaatgcataaataattgagtcatctcttttgttacatgttcctttattcttttgagttgtttgccaattcgtatctaatcatttcatataatcattatttgcatattaacaagtcatttggatgtagacatactaattctagtagttcaaaaacaatggaatagaaactataaaaagttggtatattccttatacttaaagataagttttcgcacatgtttagataacgactagacataagatgatcctacatccctgcgatttgtaaacatactgaaaaatttggcaaaactaagtcagcctttagtttaatacctaaccctaataacgtatgtttgttatagcttcataataccatgcattgaaattagaaagacaaacgaaaaaagaagtttgaaaatattttacgagtaacgttaacttatgttctagaaccttttaaaggcttaataaatgctagatatttcacgagaagaaaatagttgttttgtattataccatgtactaatttaaagaaagaaaaaaaaatcgttaccaaataatgaatgtacgtagtgttattttcatactgcaaaaactattgctacctgtaaattcctatgcgtatcagaaatatacattggagttggatgaacaagcttcgtagactttctatattcttttcttccaaaagtgaaaagtcatcgatagttgactatttttgttaatttgatatttctatttagttaatgatcttttgctagacacgacttctattcgatgcctgcataattcgtttgacaaggacatgtataaggtgatgcctcccacagaactgtctcattacgtcattaccattactaggtcgcatatggtagaaagaacgaaattgttctctttactgccatcagtatcaactctcaagagctcgacgtcaccggtttaaaaggacttaaccggaaataaatgtttgtgcacattcgttgatttcctatttgtcctttcagatccattgacgaatggttcacgaccaaaactgtaataataacgtagatgtatgaactatgaatccttacgagttacggggattaagtttaagcattaaaggcccgaaactataaccggttattcgatccataacccggttcagttgaattaagcttttaatttaaaacctttcttctcaaaagcccaccagaagaagaagaacaagaatattacctaaaatctccataaccctctttttatgttctagtcagcaatcaaatattaccttacacaaaagaatgtgatttataacctgtaattcaatctacattcaaacggtagacatctatctcaaacgaggggaatcagtatagctcagagttattgtgacatttcccatttcatgttactatctcaattctcaagcctatgaaggttagtaaatcacatagaccaatatcgatcatcgacacaatggtatgatgtattataggaatcagtgtagatcttcaaagaaccatgatctaattcctcccaaaacagatgaaacatttcacagttaccccaaaagcaccagactctaccaataaaatcttcactacatatctctaacatctgcaagctaattctcttctcaccgaagagtaacatccgaaatcgaatgatcgatagattctattctactaactgcagctcaatcctatccaagatcaaatatctcaatctccaaaactagatggcttctaacctactaactgcagctccatcctaattcccagcacatccaaaccaaatcaatacaaataaggagtaaaggaccttatgaacaaaaatgaaaacattcaatctaagattacaaatgttcacttcacaatgttcacatctcccttcagtatcttttcttttcaccattacagaacttgaatccaataaatagaactaaagtaaacaattacaaattccagacactacgctcatattattggacaatacataaaagatgcgatcttttcgaaaggtaagattttttggggacaaattacaaaaaaagattgtacctttttcaatttcaagacgaagaaagaaaagggattctctcaatcatgtccaatttcgaatccttgcactcaaagccacaaccacactgaggcgattccaaaaactcttggatcgcgaaattcgccgatgtgatcccaacggaaaactccatctcgtcaccgtttctaataacctcgacgatgttaagccacaagaacaaaactttgactttaacaccagtcaatttcttgagcttgttctcggagatgtaaccactgattgttgatttgtaattcaattggtaagaaccaacaagattgaagctacatgaatcgttgaaatacgcatggaatttgcctgttgttgtgtctaaatcataagctacgactccttttggaaggattccgacggggaagttgtagctttggaggagtgaataagccgtcggagtatcggattcggcggcggtgacgacggcggcggtgagtgaagagaggaagagacacgaagcgattaaaatcgggagacgagacatttgggtttgaggaaacacacaaatcgtagaagtaagaatccaaagattggatttttggttttttgatttctccgcctgtggattttcgttttgccgtcgtagactttttgtaataatggtggtcgttgaaaatatcttttgttagatataaactacgccgttttaggtagacaactggacacgtggttagtttctacaggcagtcaggttgtagtgataagacaaatttttgggaaaagttctcttagataatcatgaattaaattttatcaagacatttgttaacaaaaagacaaaaaaaaattgtatataatttagactatgaataatgatatagaccatactcaaaattgcaccgcaacagtattgtaacagtattaaaatctttatatatatatatatatatatattttcgttattatttgaactgtacagtacttctcttcctacacggcaaaatacagtcaccattcgaactcttatttttataaaaaattgtataaacattaatcttttgctccatgaaaaaagaagataaattaacttgaccagttttcttgtttttatggtcgcttaaatttatttattttggtgtaaaaacttcaaaaaaattctaatgttaaatagaaagtcaaaaatggttaaatagtctcggtctcggaaagctcaaattgacatgaaagagaagggctttttcggtaggaactaatcatacacatacattaatcaatttattaattaactaatcaatactcataagccaatcataagagaagggcattttttattcagtacaacacaaggcccaacagattcaagaagaaaataaaagcccattattacaatcaaacccacaaccacactgaggactctcttcaaaattagcagccggaaaactcgccgacgcgattccgacggagaagtcgagatcggcgccgtcaagagacacttcagcaatattaacccagaagaaaagaaccttaacactaactcctttcagattcttgacatgaccgggtgatataacgccggagatagttgatttgtacttgagctggtaggattggatggtgaattcacacgtgtcattgaagtagactttgaagttgcctgtttttgggttaagctcatagtcaaccactccttttgggaggattcctggtggtaagttatagagtttgacggcgtcgtaagcggttggcttttggccggagacggcgaaagagacagtgaagaatagaaagaagacgatagaacaagtattcgcgtctagcgacatggttctttacttctttaagttttgctcttatgattcgtgtctaatttagcataagctttgaagtgtctcattaagtacagaagacgaaaacagttgttaggtgtttgtgtgttctggactgtctgatgaagagaccatgcaaattagatgtacggtgacgatttgattgacagagagagcacacgtgttaatagggaaaaacgacgatcacgtggtaaccaaaccaaccttgattgaaataaagaaactcagccaagtttgcattccactggactgattttactatttcatgatcgtaactaaaaccgtactaaggatccgattgatgacttaatgcggtaaaaagctacggcatagtgaaaggctgcagtgacatgaactttgcaattcaaaatcaaactattgaactcattaacgaaaatgctattaatggaagaagaaaaaaaaaaaaaaacaatattggggtgaaatcagttttagtgtttttttttttgcctttctttttgagagaccaacgaatcatcaacaatgaaatacaaagcaatcatataattaacacaaaggacgggatcgtacttacgttttgggtttgtgctgggatccatcatcagctcacatctttcaatctctttatcaacgcatctaaagatttgttcttcgggttttgcctcgaccctcttgttccaaaagtcccgaaaatactatctgatggatctctgaatttctctgaaaccgtggctactttccggtaatccaaagcattgtagcttctttctctgatcaccgggtttacaaaattctcaggatgactactcagaagtaaattgatcatctgtcttatctcgacaaacgcttttttcatctctcttgcttctttatccgtgagcaatggagttaggttctctgtaaacgagtccaacaactgaatatccacatcaagtcctttgattgcagccatgctcaatctttttactagatccccgcataacgttccaacgattttctcagaaatgtgagcaaggacatcacgcaaaacccttttcaagactttagcgggtaagatctgttgtgcggtggaaaccaaagtttccaagtagatcaacacttcgttcatgtactcattcccaccttgtggtatatcgtcgcttgtccaattgacattctcgagtaatgtcatgaaaccatctatcttcttcttaagcattcctgagagtgtatcttctgcagtgttttgagatttcgtcaatgggaaatgcctcctacctctctccgccattctcaaaggaactcctgaaagatgtgcagcgtgacggaagaagaaatcgcaagctcgttcaaatacggccatgtttgctgcaacttgcattgcctgagaaactccatgaaccgacgtgctaatcagcttcaacagagcctcatcgagaacctcgcctagaagcctatccagatacttcttcactacatcatagaaatcaagctgacctccgtgagacatgaaactaaccgaatcctcgataaaagacctcacaatccggcaacaatctgggacggtggtcgaaaatggagcaatgaaagggaatgccggtactatttctgatgtttgtaactggaaagagagcacattcatggaatactcatattctttcttcatcaacatctgctcaaacttatctgctgataaagcttctgtgatctgtttacggcaatcagatagtaacaactcatgatacttgtccctgtgcttgcttaatacttcgagaagggaatcaacagcatagccatacctgcgtagactcacccccaacaagctcacataatccttaatcagtaagagatgattagccgtctgcattctagagaactgatcctccaacacagcacacatcttagtaacagcagtatcccacaaagtctccacttccagcttcgaaatcaaccctcctccagtccttaaaactctatcctctactatgaaaaacccagcaatctgtgcgaaaaacgtctgatgtgactcgagaaacggagtcatagtagatacctggaagtcagaggtaagctgaagatccctattgttataatagtactgcttaaaagtatccccaagagatagtgtctgatgaatgtgataagctctataaagtggtgtcaaatcaaaacctagcaatccacctccggaactaccaccatcgctgccttcatggccagaaccaaattcatcatcctcttcttcgtttagcgcataaacgcaatcgcgtagactaagtctactctgctcctccgcttgtctctgcttgatcctgagctcctcctctcgctgacgagccgcggaagcttcaccaatagccaactgacctaaattccgactcaccacacggatctcaaccaaccaatctccaaactccttattcactttcctctccacataagatcgaatcgccggaatcctattctcaagcatccgtttcagcgttgacgaaggagttttctccatgaaatcactctcaatcgagtccacacatttcaacgccatgtagaaattaccgctctgaagatgctgattagctcgagagacaagttccataacacgaacacaatgagtcaccgctccaatcgccagatcgacgttcttagacacagtctgagcctcaacaagcgaatcgagagacgaaagaagcggcgccgcaacagattggagtttagagtttgaatcggaaagcgcagatttaagcgattcaacatctgagagaagcgatttaagatcgtctacggcgtggataaagtcttgatagtgagctttacatacctcttcgatctctgattccttagatcgtgcgaaaaacttgagatggtgaagaagagtctctggtttccctgtaccgaaagttttccgaacaaatggtcctaaatcttcaccgttacaaatggcagacgatatcaagagctcgtcgagcttctccgccgaatctataccggctccggcggttgtggagccaactttccgccgtcctttcgacgattgcattgttttatctccgattaggtataaagcgttacagcgaagaagaaggaggaattttggatttgggacaacgaaactgatttggtggttttttcttcaaagggagctcgaattttggggtttgactaaaatgacattgctgtagaagcggtgcgacggaagaagacgagggtgtgtttgtcttttcaagctgcgtagtggttttttcttctgactggcgtcttcaattaattgtgaatatttgtcaaactgagttttacgcgtcacaggcgcgtggtcgaacgcgctttagattttgttgaaaatatccactgccaaaaaattaatacaccaattctgttgacaaaaaaaaaacattggtattatatattttattgaatttattcagttggtaggtataaatgtccttagtagatttataatttttgataaaattgtacatatatttcagttttttgatattaatttcacctaaaaaaaatcatctatgcttaattgaagttttctagaaaccataggaattcaacattttgaaaattaatttggacataagaaaagtttaaggatatattgaactggagatggccaacatttgagaaattatttgttctattattatattttgctaaattattaaacaagcacaatacacagatagcatccttgaaaacattacatagtagggctctaagacagtaagtaaccctgatcaagcttaatcaaccttgaatttgacattgtgcagacggagaactactacaaggatgcggtttcgcgggttctgaatttcttgaagaagccatagatatggtcagtgacctcgtcaggcttctcttgatggaggaagtgacctacaccttccattaccaccacttcttgtagaaaaggtacgtgcttcttcaaaccaccttcatgtatgtattcctttgttccggggatattgtatgttatgtctagatcacccactatgaatttcacagggactttgatttgtagaccggtccatggagctgttagttcccagcttctgcaggttaggataagaccagattgattcaagtccaagattaaccatgaaaagatgattgtatgatgtagaataggtggctagaattcataagacttacaggttcagggcgcgatagtagtttagcccaccggtgaagcctttttggctaaacttgtctccgtagaacctgacatcttgttcggtgagccaagcgggcaaagaaggtggatcaggtaaacctctgaaaccaactgactttggaatgcaaggtggacgtgggttacgcgaagtgaaaaatctggttattaacttttttgtatcaacttgagcaaagtcctcttcgatctctccaggctcctgagaaaaaagaaactcaaaatctttagtaggaccaacttaagcaattgaagaccacaagactgatccaactacatttacttaaagcaagtaactcaaataaagtaaatgactttgactttgactgcactatattaaagtaagcactaattgcctttttctaatcatcaatagcaacttgcattatcagagtcagagcctgagctaagttcagctatgtataggtaggtggctggtctctgtttctatagacacaaacagaaactaatagtggctaagaaatttctcattgtgtatacatttacacataaaaagctcaactttcttgaagcagtatcaaggcatggcaaaaagcaatcgcctaaatatacatctatctcaaatcggttcaataacttgatctcataactaaacaccaaagaagcattggctataaagcaatttgccacaactcttgttcataatcaaccaatctatcattaacgtgatcaaatcatgaacagtaatcatcaataaaccctaagtatgtctttgatttcaaccactgagaacttcaccaaaccctaattttcatttcaattaagtgttcatgagtttaaagtattacctgaaacctgcaaatgtagtaatcatcgccgaacaaagccctaaacgcatcaacaggtttcacagaaggattcctcggattaaacacaacgctagtgttgaccaacgcgttgactcgatcaggcctgatcatacaaagccaccacgcaacaattgctccccaatcgtgaccgacgaggaaaacccgatcaacaccgagcgaatccagtaatccgacgaggtctccgacgatatgaaggatggtgtaagattcacgagacggcggcgcatcggaatcgccgtatcctcgaagatctggagcgattgcgcggtaacctaaggcagcgaaagagacaagctggtgacgccatgagtaccagagatcgggaaagccatggacgaataggatcactggacctgaaccaatcgaagccacatgcatgttaataccattggtagatatcgtcgtgtgctctatcttctccattgcttctttcttctccttctcacttctttactctcaggtgtgaatgaacaaagaaatgtcattaatttaatatttttggagtcaaaatatttgagatatttttattttattttttatgactaatataaaatagagctattgacaaatatagcaccaaaaaggttttcttccaaaatcaacacaatatttttaaaatttcacaaactaacactataaactttaattaaatttaatgaaaatataaaatagaaaataaaattaagagcaaacactaatttaatattaaattgagtcaattttttagaaaaatagtaaaaatatataccctaaattgaaaattagaaaccaaatataataccataaactaatattcaaatgaatcaaaatttcttttaaatggttgaaatatataccctaaattagaaatagaatatccaaattttatattttaaatttatttcaaatttattttggttgaatagattttatataaaaattgtggtattattgaaaaaataaattagtaatactttagaacaaaaactttatagtaagtcaaatagtgttatttttggaagtttatggattgtgtgctattattgtcataaagttgttttagtgctatttgtaagaatttctctataaaataatgaccataaatattaattagtgtaaataaaatttattagatctttattttattaaagaatgttccaaattacaacaatggaccaaaattaagaccaaaatttacccataataatagctaaaacaaataatcagatacaagaaattacgaaagtaaaccactaatataaggtacaccactctgaaccatccaaccatctcctaacaagaaattctcgactgtgaaattattcgcatccgtagaattaatcacatgataaccgggccaaaccactcgatctgtagtacttgaaccggaaccggtattgttatactcagcatagtacaacgtactcaatgcgaaatctccgttccattctctccaaccaaccggttcaacaacctcgtctatgtacgattgcataaaaaccgtacgtgaatactccttccatggtcgtcccaaatacgttttaaccgtatagttactcgaaaccaaatcatctgccggtttaatcgtacaattgtgaatcgaaattcccgtgttttgattcggatcagtacgaccttgagctgtaatagcgttgaactggttctgcatcggttgtcttggatagagattacagtcttggaacacaacagctgcattgccgaatatgaaatcgactgttccataaatgtcacattctctatagaactgtcttagtgaatgtgtgtataaagtgtcttgataagcttcgaaactgcaactatagaagattgaaagatctgcactgctcctcatagctacggcctggtgcttctctggtccagcggtatttcggaaagtcatgttcacggcaacgaagttcggcgatgtaacagctgagaaaaaataaagtcacaatatttctataagaaaaatggtagtagtaattcaataatgcgtcttgtcatctattcactacatgtaatataaagtttgtcctatagtgaaaaacgtgcaattatgatccgaactactacgcacgtaaaaaagtctataaagtctgaataatttgtgtggttagttttaagatttcatcaactcatcatagccatgtgtgtcgtcggcaacgtaacaaaagtgccggtgactattttttacttagattatttgaattgattgactaatattttattattatggagaacatatttcaataaaggtttattattatctaactatatcaaattatactcttgaattattttaaaaatactattctatctgttttctaaagattatttttttagaaaaaacacatgtattaaaaaaacgtattaaatattgattataaatatattatattttatattttacagttttttataactctaaatcaatgataattaactatttttttgaaaattataattcattaatactaaccaataaatattgtatgaaaatttttaaaaaacaatattttagaaacaattttttttaagaaaatcaatcattttaaattgctcaataaatagttaaaaaccaaagttgtgcatgtgcaaaaaatagcattattttttttatgggtaaaaaaaaatagagcaattatctcttatagacgtaccaaaagtggcggagttgaaagtggtccaaccgtcgacgacattccggttaccggtaaccaccgtacggtttattccgtcaccaatcatcattagatatcttttgtttttggcaatcactacgttttcctcataaacacctgacgtcacgtagataacgaaataaccggcggtaccgtcagttttattcggcgccgaattaacagcttccgttatggtcgtgaaattccccgttccgttttggttcaccgttacgatgtcgcttacaagcaccgtgtttacgtcattatcgtcgtcagcgagtttcctcctgcttaaagactcgtaaacggcgcgtgtgtgttccgtcatctttaacggtaaagctccgttacggaaatgacggaatggttttgtgtgactgtgagtgttctttggatgggcccaagagtaactggctacttgtttcttcttctttggaacccaacctttggtgaataatgcgagcgagacactaaagagcttcgtgtcgttgattagaggcaatgcgacaccgtttcgtatagtccatgaagaggaagcggcggtgttgattccatcaagacatgtttgctcgttagtcaaagccgcggagagaagtgtttggatttcgtcggctttggaaaacgacaacgttttggatgatgtagtgatattgaccgtctcgaacgatgttatgagatagtctgttgtgaggcttgctaggtaacggcagtcttggagagctccaacggcggattgagataatagtgcattgttgcgtttgaggtatctgtcaatggtgcgtgtgaatttccgcgattgcgttagcgatttgcggagggagaagcggccgtattcgcgaacgtcgccttgagatgtttgtgggaacactgatttgcagaattttggatcgggtgttgttttgcatatggttgatgaagagtttgaaggaagaagagtttgagaagcaatgaagagtgtttgaagagataagaagagtgttacgaggaagagtttgagagatagcatgtttttttgttttttgtaaattttgatgttactaaatgtttttttggtatgattttggaaaagtttaggtttagtgggttttatagagaccaaatatatagagtgggagaggtttgggatgtgggtccgtattaaattttgttattttgagactgtatacattctatcttctatggtattatataataatgcattcatgttatctcttatcttatcatataaacatgaatatttgagatcacaaaattataattagcatatacaatttttgtaaagtacattacaaattccgtattttcaagattggttaaatttcaaaaactagaccaaaccgtcttttggaatgagtaagcaatagaagtcaaatgtgaaatcctctctatatcttgatccgatccataattgtttttgcagcaaatcggtgttagaagtttgagacctaacaattctaagtttggtttaaaatgatgtagttgttgataaaaaaaaatgatgtagtctcattcttagatcccaaaattttctacaattttagacgaatttgtttattattcggactaattctaataatttgccatttagcttgatttcacgtcgtttattgacctgtagtttggttcgtagggctaaagttagaaatatattgagattttgtttgtaaaaaaacaatccaacgtatttgtttaccaagccggagaattatctctctattcatgaggttaaacacaaaaacatcaaaataatatatagacaaagaaatttctttcaaaattgaatcaataagaattacatatatatatatatatatattgtattgttccgcaatagtttgtattttattttttgtttgtttactttttgggattatatatatatataacaaaacaataataatgcgacttttagtggttccaagtcaatatattggagtcttctgagataaaaacgcgttgtttgttattgagatattattatcatcgaacattgcattttcaaagctgcccagctgtttttggtaaagatccatcttccttcatgtcttgcctctattaattatacatattaagatccaccttccttcatttcttaggtttataaattatataatatatactatgtactaaattttgaatctaagaaaacttgtcaacgacggtggcaatgtgttaggcaatttatatatatttgggacactgtgaatagtataatatagagtcttttctatagtcaattgtccttaaattctccgtcgtttcgcctaaagtaactatcttaggtatggggcaagttattggctatttgacttatgagcctaattataaattaattgtctttcattttttggcattttgtgataatttgtttttgttcaaaccgaacttgcattgctaaaagacagagagtgttacattcttggaggggaggaggaagtaaaagccacaaggactgacttaactaaggagtcggctaaagtattggacgactttgggacataagcaatagagatagaagcgaaagaattacaaaacgaagcaatatcatggatgattttctttgagatttgaaagatatttcttagcattgataagtgagatcaagacttgagagtccaacaataccgtgaaagaggctatatccgattgatcggctgccattttaagggcattgcgaagagcaagtgcttccgttactaggattgagcctaatttgttcaattattacacctttataatatgtgaatctacaatgcattatcataaatcatttttgtgtttgaatttttactacacatacttatcattaacacacctgcatttccagtagaaaaatatgagaagaaataaaatcagctttttgtaaagttggagatgtaacatttttctttgtttaatagactgagatctcataaatttatagtacgcatttttctctttttttttttgtcaacatattttaaaaatgtatttgatgaggatatagaaaaaattgtttcaatggaacaattttttggtcaacacgcccaaataattgagcctcaagaagagtcaagactcatgaatcatccatcatggtccaccttaagatgttgcatttaaaatcgtaaagaattttgcagttggttttacacttttttgtttgtgttactaactagttatcaaagactagctattattttgtttgtattttgattcaatataatactccctttgtttttgttacagtattgtattttatagtaaaaaaaaagtttgtttcaaaaatcgtaaaatggtaaagagttttgcatttcatttaacatttttttgtttgtattactaaacaaactagttatcaaatactagctattattttgttagtatttgatttaatataatacttttctgctccttgttacagtattgtttttttaggaattttgttgtttcaaaaagataagtacagtacttttatcaatatttattagttattcttaaagaattgtaaacttcacaaaaatttattgaatactattggttagaattataaaaaattatatatcacaaaagtaatatatatattatttttttttaacaaaaaagtaatatatttatatttaatttttaatatggttttgtaatatatgtaaataaatttttttttaataaaatatggtgttggttggagaatacagtaaacttaatataggtaaacggtaacgatggattctgacccaaagactatggaatgctatggaaaatgcgtaaacggtaaaaacgcagactgtccgagaacgatggattctgacccaaagacttgactgtgacgttaacttaatataataaaacatttgtttagttgcacttgcatgttcatggtatttgtgtttccgaaaattttattatagtatgttttgttttctttttgctgattttagattggtataacttatttaaattaaaacattatcctaaaatgaaaaagggtcaattatttatagatactctcaactaacgcattaaacttcattgagagaaaaagtagactgaaaaaaagaactccacgtggtaggattgaattcgattcttatatgcaggttctagcagtcaaatcgataataaactcatttactaaatggagtttaacccgtaattctaaaaacaagtactatataagtaacgttaatgaaaaagaattgcgccatactttgagtttagcgtgaaaacatttcgcccaaaaaagaaagtgacaggtacaaaaatgtaatgaaaatggagaaagacggcatgcataatgcattctcttacggtcttacctttttcacttgtcacaacttgtatgccgacataattatagacagaccaaacgttgcgcattatgggtagcattgaaattccatatgaagaaacgtattttttttttttttttgctaacattcgaaaaaaatattcacgttcacgtaacaagaaattcaaacaatgattgaaaaaaaaattatcttgattaaaagaagtacatcaatatcgttataaaattgatttttttttgttgatcataattaagcctatttttcaccataacatagcaacagaagcatcaaacggttggcatgccgcatgcatgtagaaagattattggtcaaagttccggactttctacgatttttttttaatataaaattgatgctaaatcatgtttttattatcgttcgaaatccttaataacatgttccatgagattatgtaattgcgggtgcatgcatgtgttttcaattgataatgaaactcggtgtgcactctcactgacaatcttggatactacttaaattaataacgataaaacttgtaatatataaatacattaataatactagtttcaaatttgtttaaatgatcatgtactattcattaaggtaaattagctagataactaatttttggaagaaaatataaaaaataaacttggctgcagattcttaggtaaatgacttatttaagaaattggaacatcctaaactatatttctcttattgaactgaattttttatatcgcttgttgttgttaccgagaggggaaggaatagatccacagacgaagatgcgacgacaacaaagatcttgttgtggtggagattcagcaaaagatctgaattgtaatagatgttgtgaaaaatagttacaaaaaaccttcttatatgcttacttaaattaaggacacatatgaaaagatgtaatattagatgttggagaaagagttgtgttgactttaaaaaaacactatagggatatagttttaggaatcactaaaaaaaacgtttgcaaacacaaaaatatcactgcttgtttttaaaaatcttgacaacaacatcctcttgaaattatgaagaagatatcactactttggagattgatatgctactcttcttccaagaagtacaaagacttaattaccacccttcttgttcgattgaccgtagtctattacaacgatcaggttgtgctttattgttcgatttctcatcttcccacagagcgtcaaacctttcacaataacattgacggaggaagtaatccgacgacctatgaaaaaacaagacatagctagtgaggtcacagttcattctatgatttataaatattattaaaaataatctctttatctctttctcaggcaaaaaaacaaatcttgaaggattattgtccaaacgccatttttgcatgagcatttttcataaaagccacttttcgataatgttcaaatttgctattttttctcacttgtaaaaactagctagatatgtcaaaaaaacaattatacaatataattcataacaaaaactataccctaaaaaactggaacttaaccaaacatcatgtgtaaagttgtatataagaaaattgcatttttaaaagtttttttggccaaatggcaaaacttataaacacccctcaaataagtctcttattagtaattgattatttcttgtaatccaatgacttttgatgggttggttctccgcttatttctagtggcatcataagtcatcaatcttatcctagataaaagacaaagagtcgatcgctcataacgcatgcatcacataatgaacgagaaagcatttgataaaccccattgtttccaattcaaccatcatagtgcatcagtggagatccgacctacatgtaaagcttcattttcatatcaagttgattgacaaattaaagttttctgcaaaaataaatgtttgtttcatccatttatttgtatcgattttgtacgattggtgcaattgaccatcttaagagtatcgcaagctgttctgaagactataaaactcacttcgatgcgcatatcgcaagctgttctgacgactataaaactcacgtccgtcggagttggactctccatgacgacccactaaaatattcttgatctcggatgataatgaaaagatcttgttggagattgtgattgggcttttactttgacaagtttagcatttttagtaaaatctctataatttaatactcgataaatttattccactttctaatctctataaattgataaattctttcggtcccgagttggtgcgataatattttttttgaaaaccatgtgtaaacatatagtctatcaatatcataaattaataattgtataaatttatctatatatatatataacttaatatattaatatatgatatataaattactatcatatatatttatatattatatgttaaaagattaagtgaaatatgattgtaagatcgtttgttttacttaaatttgttctaagttttggaagagtttattaagttttgttttctaaacttaataattagttttagaaaaatattgattacaaaaagaactagttttcatatagattttttttaaaaaaaaatacaaaattagtataatattattaatttattgataaattaatatttttataaattaatagaattattcgagcccaacattattgatgtatagtagtgttactgtggttgatttgaactttcacttttgagccgaaagatagtttctttagacctacttactaggtctttcacatgttaatgggccgagttcagtggagtgaaacccaacaccaatagtcaacccattagttcttaaattaggcatcaaattttctgaacggtggatctaaacaataataaccaaaggatatttctttcctgttacgttcaacagaatttcaattgtgactgaaatcatatatcattccatatacaaatcaaatgcaaattacttccatgtcactctttttttcgttctaggttaccgttggaaatttattatataagtttttgtttcatacagcttctctcttaaaatattatacaatccaatgacgacaaaatcaaaacacattattctcagtttgacctttctcctacttttcttatccaccgtcttctcatctcacgtaacgcagcgttttacatcctccgatgacatcactgagctcgtcgtcaccgcattaaaccaaaccatctcaaatgtcaatctctcttcctccaacttctccgacctcctacaacgtctagggtctaacctaagccatcgcgatctttgcgcattcgatgactgtctcgagctactcgatgacaccgtcttcgatctcaccaccgcgatatccaagctccgatctcattctccggagctccataacgtcaaaatgttactcagcgccgcgatgacaaatacacgaacgtgtctcgatggtttcgcttctagcgacaacgatgagaatttgaataataatgataataaaacatatggagtggctgagagcttgaaggagagtcttttcaatatctctagccacgtcagcgactcgttggctatgcttgagaatattccagggcatattccggggaaagtaaaggaggacgttgggtttccgatgtgggtctcagggagtgaccggaatctacttcaagacccggtggatgagactaaggttaatctcgtggtggctcaaaatgggactggaaactacacgaccattggcgaggccatatccgccgcacccaactcgagtgaaaccaggtacgataaagttaaatattaggtttgattggtaaggtaacgtgtagatgacaataacattctgcatgttttttacatgttacgaaattatattaaatgacgtctttgtgttgccttcttttcaaagttttggctcgaataatgattcatttgttccatttcctcgatttttaccttttgttttttttttttttttttttttttttttttttttgtctttatgtttcgtagagtctaatttaagaaggattcggtggaaaatgataagaaatataagcttaaaatataatgacgacaaagtgttacaaataatttcaattagtgaatttttttatagatcagtagaaaattcttgtttagtccttgctttgaaaatcttctttgaattctatacttattataatacgtttttccaagttttgatatgtagaattatttgaagactcttttcttgtttcagcattttctttcaacaaattatcttaaacttgctctatactcatcacagcagctacaacaacatagcttcaacattttttaaactaaaaaaaaaaaaaaaaaaatcttaacttgaagaacgaaactattttcttctattccacgcaaaatcaatgacaaattataagtgtcaaatattcacaaaatatctcatcaatagtttctacggaaattttggttgtgaattgagatcattagttttgttttgtttccttttgacaaaacaaagaaagaactaatgatattaaggtaatcaaactttcataaacgtcactcagagaatcaagaataatttctacatgatcaatggaaaagatctccaaataaactatgacataaaacacataatctttcattaaattgccaattaaacataaaattccataaactgtttagatattgttgtcgacctgtccatttaactttaagtcagtcagggaaattctaaaaatatatatgttttaagagtacaatttatattttcatgatcttattccttttgtaatcggtacctacatgtatgtgtaacaataagagtgagatacatgtacatattttttcttttggtcagcaatactcatacatgtttaattttattatacatatgtctttattttttagcttaaaaaatacataactatgcttatcggaaaaaatgttatttaatacctaaactttcaaaaaatggccaaattaaccgtgaacttttgaaatggtcgttttatacctcaaaaaaaagttgatttctaatttaacctataatttattgttgacttctaatttaacatataatttatcgttgacccagccaaatagactcaccgttaacactccttaacagcgctcctaacagccgttacaaaacatggcctaacagccgttatcgttggtttaaggacaaaaacagttgttagttacgctgttaggagagctgttaagaagtgttaatggtgagtcgatttggccgtgtcaacgataacttataggttaaattagaagtcaactttttgttgaggtataaaacggccatttcaaaaattcatggttaatttggccactttttaaaagttcaggtattaaataacattttttctattctttatcacctttgaatatttatttcagtgtctcagtgagtgtatattgattttttttatggtaggtttgtgatatatataaaatgtggggaatattttgaaaacattgaaataccgagggaaaagacaatgataatgttcattggagatggaatcggacggacagtaataaaagctaaccgcagctatgcagatggatggacagcctttcactctgctaccgttggtacgttttcttcttaaatttaattttaatccctcagttttataatactaaacatttctgcagcttatattaaatattactcaaataaatacctttcataggcttcacgactaacgattataatgtttattgtgattcactaatcagctagtttttacttttgtaaatgatgtgcaggcgtgagaggtagtggcttcatagctaaggacttatcattcgtgaattatgccggaccggaaaaacaccaagctgtggcattacgaagtagctctgacctctctgcttactaccgatgcagctttgaaagctaccaagacaccatttacgtccattcacacaaacagttttatcgagaatgtgatatatatggcacagtcgatttcatatttggtgacgcatcggttgtgttccagaattgtagtctctatgctcgtagaccaaatcctaaccagaaaatcatatataccgctcaaggccgggaaaactcacgtgaacccactggtatttctataattagtagcaggattttggcggcacctgacttgatccctgtgcaagccaacttcaaagcatatttaggtcgtccgtggcaactatattctaggacggttattatgaaatcgtttattgatgacttggtggatcctgccggatggttgaagtggaaagatgattttgctcttgaaactttgtattatggagagtacatgaatgaaggacccggttcgaacatgacaaaccgggtccaatggcctggttttaagcgtatcgaaaccgtagaagaagcaagtcaattctctgttggtccatttatcgatggtaacaaatggcttaattctacgagaattccttttactcttgatctctgatctaatcattacaattttgataaacatagtttttctctatatattatgagcaaaattttgttactattttgtgcataggattgtatcagtcttttagacattttccttttatcatggctcattaattacagtacttgcacaacgcacacttatatgttcttaattcatatatcttataacattttagtgtctcaataaaaaaaaacgttttagtgtcgttttctcttttttcatctattcatagctctagctgatatataagaaaagaagaaaacaaaattgctgattgtgaagagagggaaataaataactttcataggctcttatataaattataaaacaacttaatttttaaagttttgcaaacaagctctctaaattaaaatatgttttggttggaacaagatctctgagattttgagacaaacacacaaacacaatcatgttcttcagtcatgaggtcagagttttcacgatttcatcgaaagcttttatcttcttcgtgactttgatgcttgatatttaaatcgaaacatgtcacacatgatttcctaatataacttttgctggaatataactttgtctttgactttgatgcttgataattatatcgaattacgtttttgaagagtgtgtctttatgattgggatccagtactcaattctttgtcatgacaaatcttgtaattgttttggctgtcttgtctccatcctcttttatttcaaagtgtgatataaccagagctgaccaaagtgtaggtcgaaacctctacaaatcatacaaattaaagactaaaacaaatcattcgaaaatattgttaccgacgaagaattagtagagctcacagttatgacgaaaatcgtagataaccaaacacagaaaaacatacaaaatttacactaagtcagaatacttatatataaataaggtcttacacatgttcaatatgcatgattctaagaaaaggtttttttatctatgtctcaaatacataactcttagcaagattcagctcactcttccggaaacaccacaatagaatagtgtctgaaaagagaaatcaaactttattggatatggtttagatagatgataaatctcactgatcttctattatccttttgaggatatactctagagacgtctacgtttctgctaaacatatgtccattaaaatcagtcgacttgaaaaggttcataatttgtcttttctgaaaatttgggattgtgaatcttatgtcaaacgattgattactgataatcttggacccaaatctgataaatgctacttcataggttatcataaggaaaccacaaattattacttttactatcctactgacaacaaagtgtttgttgctcgaaatgcactacaagaaaacagtcgttttgcgagggaaaaattactcgttaatccctcgcaaacagctatacgcaagggatttgcgaggaaaacgagttcctcgcaaatcgcttctcgcaaatggttatatgtcgcaattccctcgcaattgttgcgaggaactattttcctcgcaaatcacacgcaattgttgcctagtacttccctcgcaataactacgacggatttgcgattctgttttaccgcctagcaaatctctagcagaatttgcgatggatttgcaagcgttctgcaacgttttttctgatatattaagacttgattagtgtctgattagtctctaattacctagttaattagttgttaattatagatgattttgtatgcaattcaaagctgaaatttcattaacttgttctaaatagataaatacacaattgaagtttaaattcaaaaacaatattagattgtttgaaactctaagaacttgttctaaagagatataacaaggaaaaagcaagacaatgttttcaaaatacagttgatggaggagaggatcctgttgcaaggttagctagggcagcagctgctgtctcctcattggccacctccggttctggagcagtagacacaggtggttcatttgggttggcctgtcctgtctgtgtcgaggaaccacgtcgaagaattgcagccaaagcaggatctttttcagcaagatagtcaaacaggatgtcgaagctattgatcttctcagcctgagattgaatgcatgcttcagcggcagccagcttctgagaaagtatgaccggatcatcactaggaagcattggaccactatgggctgaggatgcttcaaactgcagagatccaaccccataaatccttcctttctttcgcggagcaaccagcaaagatcacaaacactcacaaggacacaacagaaaaaccatgagaaaccaagttcaaaagaattcagacacaaagtataatgaataagctgccaagactaagagaactttatatcaaacactagcgacacaacacaaacatttcagacaagtacacaacacaaacacttcagacaagtacactaaagaattcagacaagtacagaagtacacaacagaacagaattcagctgccaagtacacaacataattcagacaagtacagaacacaaagaattcagacacaaagtataatgaataagctgccaagattacgagaacttgatatcaaagactagagacacaacacaaacatttcagacaagtacacaacagaattcagacaagtttacaagtacacaacataacagaattaagctgccaagtacacaacataattcagacaagtacacaacagaattcagacaagtacacaacacaacaagctgccaagtacacaacataattcagacaagtacacaacagaattcagacaagtacacaacacaacaagttgccaagtacacaacataattcagacaagtccacaacaaaattcagacaagtacacaacacaacaagctgcaaagaaaaagcacaaaagatttacctcagtaaaaatcttgtttttggcatgaacagacaacccacctgatccagtgctctccggattgtccagtgagcacatatgagactcttcctcttctatcctagatgtcacttgcttgtaaatttcctctgacttcccatcgatgaaagttccatccgcttttctgtgtgtctcatctagcagctctaggaaatcaggagttgtttctccagtcttctcacactgaaacacaaagagataaacaagttagattcataacattgtagtttaagtaatggtaaggagagaagaatacttatctaacccgttttcttgcacgagctttgtaagaggtctggcctgaacggtgtttatagatgcctttgccatccggatcatgatatctagcatttctgctgttgttactttttttctctgactttggatcttgccaaaactgtactagacctttccacacatcaggatcaatccattttggcttggcttcatcacccttctccttccaatttcccttccaccttgacacttgatcagacatcctagactttagctttgcttcaaactcaacccttactcttttgttaattgaacggtcccagttatatacttgctacaaaacagacaaagcaaacatcaaacatcagactacaaaacagacaaagcaaagcaaacaaaacagacaaagcaaacaaaacaagcataaacatcaaaagagcacaaaacttaccgcaaacgtttcataccatcgatcgattgtagcctttgatgtctgtgaccaattggcatgaggttctttgaaatctctttcaaatatgctgcggactgttgctgcaactgtagagtcatcgtcaaacctacaacaacagcaacaaaacacataaggatctctatgtctttatacttctaagaaactacaatgctaagtacaaccaacctaaatccagagacttctaaggcaggaccaaacttctaaggcagaaccaacctaaatccagagacttctaaggcagaatcaaacttctaaggcaaaactaaccaacttacaagacctaattccagagactataagcttaaccttaccatagagtacccggaggacgctttgggtctagccttgtcaagccagcacgaccaggactatcgaggagctcttccagtgtcagattgttgagacggtcagcttgaacatcagaatgattgacaaaaggctgagtcgttggcgttggaggcgatggtggaacggttgaacctgaacctgaacctgaaccttgaacccctgagatattcccaccactaagcggagaattgacatgcaacgggtcacgctgctgttgtctaaaccggacataagtattatccgacggcatcttgcacaaaaaacaaatcaagtgttagatctgggaaaaaagaagtaagatcggagaagaagaataggtcagatttgagagaagaacttagatcggagaaacagaggttacctttgaggcaaaatagatcgagtcagagaagaagagccgcggcggttctggagcacagatcgaagaagaagagaggcggcgaagagagtttgcgccgtaattagatcggagaagaagagaggcggcgatgagtgtaacagattagagaagaagaagaagaagagttagatctgggaaaaagagtaagatcggagaagaagaataagtcggatttgagagaagaacttagattggagaaacagaaattacctttgaggcaaaaccgatcgagtcggagaagaggagacgcggcggttctggagcacagatcgaagaagaagagaggcggcgaagagactctgcgccgtaattagatcggagaagaagagaggcggcgatgagtataacagattagagaagaagaagaagaagagaggcggtgacggaatcagatcggagaagaatagctccggcgccgaagagatcagagaagaagaagaaaaaatttagggttagggtttgatgcggctggtttgagctccgctcaaaccaggtcttcgagtatatataaaaatttatttcctcgcaaaaccctcgcacagtttgctttgaaattgcgaggaagatttttaaaccaattaaaacgaaccacatattgcgagagaattgccagaactcctagcaagtccctcgcaatttatgatttttaataatttaggatttagggtaaaatttgcgagggaagtgcgattgcgtctagcaattccctcgcaattcttcaaccaattaactcaccattttgattcagtgtttgaatcagatctgatttagattctcctatttcgaataagactctcagcaaataaaaacatgagtaaatattttaaataatttaaggtttatggtaaatatttgcgagggaactgctacgacagacttgcaaatctctcgcaaagacctcgcaatattgagtcaatttgaaaaaatacaagaaaacactaattaaaattattcggattagttattctgaatcattaggaagttaaatatctacattagaatctaatttcatctcaaaaaattcaaatgtgcatttttcccaaatacatcaatgatgaacttatgtgttttcaataatatgaataataagtgtttaacatcttcattatgaaatgttgatattgaaacatatacaatatgtttttgtgcatcaccatataatcaacttgtatgattatacagtcatttagatttacatttataaataaaaatcaaagatcccaaatcacttctatgtattttagggtttagggtaaagatttgcgagatttttgcgagtggtttgcgagggttgatattgttaattgcaaagtactcgtatattcctcgcaaatttgcgaggaagcagtctctcgcaatatttgcgagggattagcaacgttcgtccgtggtgtagtaaagtacttgcaattccctcgcaaatttgcgagggattcgttccctcgcaattgttcctcgcaaaacgactgttttcttgtagtgatggtacttttttgaaaagagagtttctttccaaagaaaatattggaagtaaagtattactcgaagaagtttgagaaccacagaagaaatatgagtcatagcatataatatattatttgcatttaagtttctcttagattaggaaattagattaatctcatctctatataagtgaatatttatattgtatctttattctcatgaaagtctattataattctttctaaatactcttgtgttctttactctcatcagtttatcaaaaatagcagatcatatcaaacaaaacaaccaatatgacttaaatggttattagaaattttaaatcacaatcaacgagaaagatcaaaaaaaaattcgaaaactgcaagctt

SEQ ID NO: 515 - DNA, 113566 bp, Arabidopsis thaliana
aagcttctgcatgctgcacaatgttcaataattgtgccatggaccctttatgttactttcatattgatttgacaaaagcatttaaacatgttgatgaccgcgttttgcgtactttgcttaatcgttctggaaaacaactcaggttatttcacatatattggcttgcactttcttatatatcttcgacaatgctttgttaattagtatatgtaaccatctctcattggtttggttgcgtttagatcccttaaacttggtcgtgttgatgctcccggatgtttgtttagaagttcttgtcttcctccactaatactttatgggaataatgcgagaagagcccttaaacttggtcgtgatcctcctggtcttggatctttgtttacaagatcttgttttgatccactaaaacttaccgggtatatatagattgttggcttgatcatcaatatatttagtgccttttatgttttaactcttacagcatgtttctttggtattttgtcttctccattcaactaggaatcttttgacaagtctacacatttactctcttggattcatgaacatgaattcctttttggatccattgtcagcctgctcgaatctaaccgatttgaagattgttggagtgtaagttagagtgcctactttttcttattagctatattccttgtatgcatgtttaaatttcatgaaatgtccatttttttttgccatttatttctttatagagatgcatcttctattgaattctttgggaacattatcttcttttttttctttgtcaggaatgttttgttagagccgatattagagttacttgcgagaaactgttgcttgatagagcatctgttcttagataactgttctcaaggtaaaacttttacatggtggggcttcctttattttactgtggcttaaaacattttgatatctcaataatatgcatgctttaaactaattacgtggattggctatatagcctgatatggtcgtggttgttttagcatcatgaaaaattatcttttgaatctctagctagctacaaaccactctatgagtctgtatatatgcccactcatcagtatatccatcttcttgttgtgctttaataatgcttctcgtaagcaaaagatggtgtgcatggtttccaaacaaagttgtgttaaattcttcttaaacgttaattatccttctatatatccttagaaagtgaatgttcaaatgtgatgatggactttgagagattcaccctttgtcctgattcaaactggtaattttggagaggatttgattcatcagagacaaagcataaacaactccatttgatccatctttctgcaaaccccaacttcttgatagttttctcaacaaaggtccactataaacccactccgctcagtcttcgctctaggctctagacctttgaaaatcccctcctcactctcatcctcaagaggagaaaaggttagagaagtacttgcaagccataaaaatcccatctgttggttgatcttctctgttttgtaacatgcatcataattttttttttgaattttctctccatttttaagccaagtgaccatgccgagtaaaaaacatagtttttagctcatggattctgatctcggggttaaggctcggtataactcttccacacaaatatctcttttctgcattattgtctaatcctagaggccaaatcatttccttcatgctgagtatctgtatctaacagctacgttttgggataatggtcttttcttgaaaacaatatccacatctgtttttagtttgacgatttaattagtttagtagctcttattaaaaagctttagttttaaagtaagtatcatccacatattggggagagaacatagatgatatctctgtcataaatattaacaccaacttgcaagagatttcatcccattccgaaacatcaaaatagtgtgttcagatcaaacagattcacaatctcaactattgttgttaccattaattccatacacatatattcatgtttttcaagcatcctgtttccaaatcctgatagttttatccaaatgattacccgatgaagatatctcgttctgaaccggatggcaactcactgagatcactgcgtctgtgtggccttctagtctctgcagtatatttctcgcttgaagatcccacagatacacacaattatcctctgatccactcacaatgtacttcccattcgttacagaaaacgccgatgtgatacagaacactttgttagtatgtcctgtatacactttcaaaaacttccccgtcgcatagttcgacagcttctgttaaaatacacaaagataaaatcaatccatttagtctcatcttctacatcaatatgatctcaagatcgacaagataacacaaatgcaagaacccatccaagactatacgaaagttcaacactttatttcttcttcatagttactatatatgttctgtatcaaaatgttaccaagatcaacaacatcaaagactaactcttaacttcttgttcatatcccaaatcacacatgatgcaaattcgaaacctaaatatttctacattcttcaattcattattaagccaagaagaagtttgaacttacgagagtactatcgagagtagcaacgagtataaacttgccattgggcgagaacttagcgaaagaaacagccggagatttatcatcaataagagtcttcaagcaagttccttctttagcatcccaaatcttacaagaaccatcatgacttgccgaaacaatcaacgatccatctctattaaaatgcacactcgaaatcggcatcgaatgagctttaatcatcctaacacacttcccagtcttaacctcccaaatacgaatcgtctcatcgaacgatccagacacaatcaaattcgaaggaggattgaaattaacacagaagacgaaattcgtatgacctctaagaaccttaagacattcataaggagatctagcgtcccagattcgaagcgtacaatcatcagaagcagagcaagtgtaatgcgaatcagaagaccaagctagatcggagataccactagagtgaccttcgtaacgatgaatgagagagtagtttgttgctgaccagaggatcatggttttgtctacggaagcggaagcgagaagattgccgtcgttggagaatttgacgcaagagatcgccgccgtgtgaccttctagggttttcaggtgacggtatggcttatatatcggaacgtttccgcttgttcctgcgttaccggtggaattcgcgttagcgactccgttacttgttccgttaccaccgcttggcatcgtcgtctctcgtcggatttagcagagtggagatgatctcaatgaatctctcaccgttacatatatatacattccgttgaccatgacctcttgggaattacatttttacccttcattcctcatttctcgtattggtggttcttcggctcggttcggttcgatttgaatttgtcgattttgttgaactaaaattggtccggttcgtttggtttatttagttcgaaggcactttattcggttggtttcagtaatgaggtttcggtatatttgggttaatttcggtttgtataatcggttcaattcgattttaatgcccactacattagaggactctgaaatcaagatttatgtatccaaacatctgtgaatgaaattgagataaatccatagatgatggttatattatacacacaacagaagggaagatttatgcaagaaacgaatgtaattttgaacattgagaagatcctatgaaggcttgtttttgccgtaaatatcttcaaaaccatcagctactcgtttccttctttcagcaatcatttctgaatacgactgaaccaaagtacacgaaaaaaccaccagaatctcaaagacaagaccaaagtaaagtcttgttcactaagattatagaaactagcattgtctgaagatgtttaaacaggatttttactttaacttagacttagtaaattagagctacgaacatttctttagtaagggaatgaaaaggagaggttgttagatgatggaagggaaaatcatacctttgggtagctataaaggaatatgtaccaccaagcaccaattacaccaaccgcaagcgatgaaactatgaccgagtgtagtattacccagctacatgccactattgatagacccgttaacattatcgtccatggctgacacctgagaaacatagccagttgcttattcaaaaccatacggaagaacactaggccctgaaaacgtctaagaagaaccgtaaagttcttgattgcaaatacacaccagatcaatagatattcaaagctgtagatgctgaggtcgaaatgttaaacccttcttaacccaattaccattacataatctgtattttggttcttcactatcttcctaaccaaaagattcaaactttttctttctatcttctaaaccacaacacacaatcatgaaactgtaatggggtaagtcttgttttaagtagcatcaataaatatatagcttcatatatgattcaaaaaagttcttgggcaggcataaatcactgaaaatgctaataaagattaaggattggtccacttaaaagtgaacttaagactctatctaagctataatcccatattcacaaccaacaaatacgattcctcataagtcttaggaccaaatccaaactacttgaaataaaattgttgggaacttaaatgagatttaccaagagggtttagtgtcccaaacagagtcgtattcgagagagagattgtctaagaaaccttccatgtcatcaactacgcctttttcatcgacaaatcttgaatccttcggctctctccgattcccaccaaaacttctaactttcgtactaatccttattggtttgagattgaacgagtgtaagttcgttcggaaactgagttttgaaagaagattctctgtttgaggccgaaacggcgacagagacacggcggacatggagagacttgccatctgaagacgacgataaggatagaggactcgattgactctaattaaaatgtggggtgctttgtgtaaaatcaaaacatgattttcagtggtgaataatgataaatattgggcctattcgttaagggcccaataagtaaaaaggcgcagatactgtatatgaatcaaagccctaatttatcagacagctgcttagattttgttttcttcattgtcgtcgtcggagtgaattagggattcgagaatgacgatgaactcgcttccgaggagatttgggaagaatcatggctatttggatcgagattatcgaaacggaagacgatctggttcagattccgatgaagaattgaagggattgagtcacgaagagtataggaggcagaaacggcttaagatgaggaaatcagccaagttctgcttttgggagaacacaccgagtccacctagagatcagaacgaggattccgatgagaacgccgacgagattcaggacaagaacggcggcgaaagagatgataattcgaaagggaaagaaaggaaaggtaaatctgactcggaatctgaatctgatggtttgagatctaggaagaggaagagtaagagctcgaggtctaagcgcaggagaaagagatcttatgacagcgatagtgaatccgaagggagtgagagtgattcggaagaggaagataggagacgaaggaggaagagttcttctaagaggaagaagagtagaagcagccgtagttttaggaaaaagcgaagtcataggagaaagacgaaatacagtgactctgatgagagcagcgatgaagatagtaaagctgagattagtgcttcttcgtctggggaggaagaagataccaagtcaaagagcaagaggcggaagaaatcttcggattctagttcaaaacgaagcaagggagagaagacgaagtcagggagtgacagcgatggtactgaggaagattcgaagatgcaagtagacgaaacggtgaagaacactgagctagaacttgatgaagaagagttgaagaagttcaaagagatgattgaattaaagaagaaatcttcagctgttgatgaagaggaagaagaaggtgatgttggtccaatgccattacctaaagctgaaggtcacatcagttatggtggtgctttaagacccggtgaaggagacgccattgcacagtatgttcagcaaggtaaacgtatcccacgtagaggagaagtgggtcttaacgctgaagagattcagaagtttgaggatcttggttatgtgatgagtggaagtaggcatcaaaggatgaatgctattcgtattagaaaagaaaaccaggtttacagtgctgaagacaaacgggcattggccatgtttaactacgaggagaaggcgaagcgcgaggctaaggttatgtctgatctgcagcggcttgtgcagcgccatatgggagaagaggtggggccaaatcatgaccctttcggtgctggaaagactgaagaagatgatgattgattttgcttggcttcctgcttctgttatgtgggtactcatcttatgctttatcttgttgaatgttccttatttgcatcatagatactgctgtttgctacttgcccgttaatgagcttcgtagtttatgctttaatctgctatgtatccgttaatgagcttcatagtttatgcgttaatctgctatgtatcacatgattgtgtttgtgtgtcaaagataatagattctgacactgaggatctgcaaccgttcttgtgcatttaccttaggtcatgttcgatgattgaattttgcagggcattcacttagttctgagattgtagaacaatcaattatttaggatatccgctttgagcccaccactgtattttcgaataatgtcctttaatgagcttcacagattatgcattcctccctctgtattcatatcattgcgtttgtctgttaagaatccagtcatatcatcatcaatgttatcattgtcaccattattatcatcattctatttttagaactgtgaaacaaaacaagtacttatatatattattggggatctctataattgtgaagtgcaataatttcggaatttggaggcagataaaatttgcaataatatccgaatttgcaggcagatcatattattggtaaattacctgcaagggttccaattatagtttatgattccacttttgtggaactatacaatgtctgaatctgttctcaataaatgcactatctcaatagaagaccctaccaagtacctagtccataatctattattcgtttcataaataataacatataaatcattcaaagaagcaaaatgattttggttaagaattgaatgacaaagaaaacgacatctgttcaatttagaggagattagcattttcgtattactattcaaagcttaaaaatagtatttaaaaacaaaaaaattatcaaagaaatgtcatgtaaaggtcctcttctcatgcacgaaacgaatgataattaaattaatttatgagcaagacgcttaagtgatccttaattgctttgtttataaaatagtttaattattattactctgctcaagtaaagaacgtgaaggacaaaatggtaactgaatatagtaaagggtattaatgtaatttcaattcagcagactcatgaagtaactgtgcctacttaaagacaactgctctgttctctctctctccttcgtctctatcaagctcatttctcagatccgtaggatcttcatttccatggaggcttaaaaaccctagaagatattcttttacacatcactcatccgctagtgaagataaaaatcatttctagagcttcctctttctctctctgtatgatctgaagcgaatcgtctttagattcttcaccaatcactatcaaaaggacctctttttaaaggtgaatttctctatggaagctgtcttatatgttccttttttcaggatctgatcttttcatttcgctttgtttctttgtatgtgatgatttacttggttttcccccatttctctggcttgcaattgtttgtttcagcttttcgagacgagctgggtttcggatcctgtgagcttcagagacgcttactggtttatcaacaaggctttccctttgaatcaagctttgattgagaaaggagtgaaaagattttgattttgatcagatacacaaagtgttcttgcgttagttaagcgactaggtgtgtgttgttgtagtgaaagcttcttactgttgacagtatctcgaaatggaaacgcttattgtagctgtggaacatagggatcaatattatgggaagaaatctcttggacatgatcgttttagatcagctccttccaaaacttttaggcagatcaattgcagaacttttcaatctggtgtgggtttgcttccaagacctaagagaacttcttcaacacctttaaccaaaggagctctttctcaagttcagtctcctcgttctcctaagtccgttttaccggtttttcatcatccatctgttgacagtggtagaaccagtcccattccaattgctaattgcagaggttctcagatccgtaggtgttctagtgagtttgttgacaaaaggagaagcctttcttattctgagctatgggcaggacctacttactctaactcacctccacctgcttctgtgccgattcctaagttttctctccagcaaaagaggacggtatctttgacctttcctgctcctgactctgctgttgatattcgtgaagttgctaagtctgcaccagtttctccaacctcatctggtgacaatccttttcgtagtactgtctctgccactatgacactgcgtcgcatgctcaatcttgagcttgagactgcagatgaatgaagatcaggagcctttagggggaacggggttagttttagttttatgcacatagaaataaggtgttagtcaccaagctggtttgagtttgtttcttagcttttaatggtgatggtaaaggaatacgtaagcagtcttgactcggagtttgtcagcagttactggatctcctggtgcagattggggtgttattagtggtggaacagctggttatagcgagtagaaacattcaagtaatggtggtgtgttattaatgatggaatagctggttatagtgggtagaaacattcaggaagcagattcatgtcgcgtaaaagagaagacttgattcttggtgtagcatataggatggccaaaaaattaccagtctaacatataccctgggtgaatgctaagttcgtatggtgatacttgaacattagcgtttcctctttgccctttgtatagtttcttcttagagtcgtcttttccttttggcttctttatcttaagtgggttagatagcatctagctagcttgtatatgtagtagagcctttgatcatactgggtttctgtttcattcttccaagtttcgtcttttcgggttcttagtcttactgttgtcttgtatctccctctctgtccatatctttatctttaactctcttttttaagtcttcttctcttccttcttattcatttctgtcaagccttaaatgatgtaaatctaactactctcctgctaagtgatcttcctcttcgcctcgcttcctgtttttttgaaatggaaaaagggaagaggaagttttactgaccctcttagagtcttagactatctctgctggtaaaggttcatccagattcaagccatttcagtctcaacattaatccacttcttgtgaagaaaagacattcctcaggttcttacctagaacacctttgtcacgttggagttttgtgatcatgcctaatctgcttaccaggtaaatctgaagctctccttagctcttccagtttaggaatctgaatgtgtaacttatacaagtttttgattttgtaacagagacctggagaagctactgctcctctgcttttgatgctgcttcttagtttctttgtctctctactatctttggttgttttgttagataaggagacaagtgttgtctgtgtgtttggaactgttgtgtgaaactatccacataagtttgtttcgtattgtcttttgtagtttgtgatagtgttgtagagacgttttgagtattttaatggtgaaggatacgtaacccttgttccctataattatcatcattttcgatggtttatttattgcctagtgagatttggtgaaggtatttagagtctacaagtaacttcaccaatctcactatgcaatgtctcatagatttgaggttcaggtgtatgtaactatgtataaccttatctgaaactcagatgggcacatgtattttgtaaaatattttaaacagtagtctatttatcgaaagtagtcttgttcatttcataataagattactactcaaaattattttttaaacttattttgttatagttagcctatctttgatcccaaattaatccgttcagatagaaccaaactaatcgatccgaaaactacactattttattcagtgatactttttgtttaaatggattgttttttttttttccagctgatatcctagacacaaaaaaggcccgttataagcccattgaactacctttactttttgtttagtaggcttttgcttgacctcgttataagcccattgctatatcatctcgcgaaaacgattgtcctcttcttctttttctttttcttttcttctttttgtaatcgttgtaatcgttaaaaagacaactttcaatactttaattatggtggtaggctatagttactatttatgctaatgttaagaaagatttaaaaataaaagaaacagacgtttgggaccaagcagagagagaggttgttgaagatgataattattgagagttctaattattgagaacttctaaatgttaatttggtttccgagttttcatgatggttcatcattacgattgggcccaacaacaacaagaaagaaaactttggtggcattttttgttcgtatttaaaagtgtgcaaagtatggataccgacaggtagtgttagaggcacactgtttcatatttcactctctttattaatcaagaactacagtctacagaatctacagtatttggatcacttactcaaaagtacacaatggaaattttcataactatgatttaataatcgaagagtttctttaagtttatacttgtctttaataatccataccttgtgtaacttttctctctttttcttttaggaaaaataaatgaagcttagttgataacatgtgcaaacagtgaaagattaagctatagctattacaagccgacatttaatggcatgtgatgagaggtttcaaaataaatttaattattatacacaactaaaataaacttatttgttcttcttttcaaaataaatatcgtttgaaaaatatgtatatttattcataattcagttatatctttaataaaaaatctgataaatctatatatacatttttgcagccattttagcaaataaatcatggacttacacttatttacaatctaatgccattagcattaaatctttttttccaaaataattaattttactttcaatttttgatttaaattgtcaatcacattatcaatcaaatttcatcccaacaaacttcaaatcaatcccttaaaattagcataaacatatttgttaacaatattttaaaataaagtttttgttaaataaatattattcttactaaacgttttttgtttaaataaataaattttgtatttgaacttatttacaatgtcatgtcactgacattaattatttattaatgaaaatatttagttaaagatttaaatcttctaaatccttgcttttagagttattatgtcattaccttataagcaaaaatattatttttttaaatattattatttatatatttaaaatttataaaatattattaatatttaaacttataaaaagtttgatatatcacaattctttaacatcattatataatatatagagtttaaaaaaatcttaatttttttcgtcatattttatgattcaaaattttaaaaatgaacatatattaaccaattggtaaaaaatgtatgggttcaacgtcccgcatcgacaaaaatatttagacaatgatttataaacatatcataaataagattaacattaatataaataaatggtttttttacgggacgggtttgacaggacgttacttaataacaattataaactataaaataaaaatatattatagatagatacaatttgcaaaaaaaaaattatactaactttaaaaagataaattgtccccgcagtgtaccgcgggttaaaatctagtgttttacaattttacattttgcctttaaaaagtataaattaatcttacaaagtcaaaataataagcgatataatcttcatatatatattctaaaattttcacggtcgcatacattatatttgaatttgttttaaatagttggtcgtaagaacttcaaatttggtattattaaaattttagaaatttaacgatgatgacgatgagttatattacttattattttttattttgtatcgactaatttgtattatttagaaacatatgattaaattaaaaaatatggcaattataaaggttttttttttgtgtagaaaaccatatttgtttgtttttttgttaaaattttgactcttgttattatgttctgttgatatagtatttttttcctgtagaaagatttttaaatttctagtttaaattacaatagctaaaaattaatattaaaaaataaaacttgattatcaccttaagatgtgtatgtatgtgtaatgtgtatgtatgtgatgcgcatgggtgagttgtgcaacgtggacgaatatgattgggtgacgtacatgggacccaaagttcagctctacgcctctctgtgccttcgcctttttccttttcttgattctctttttttccaaagattctttcttttctttttattattatatatatatatatataaagaaaaaatatttttttgtcaactatataaagaaacaatatgaaaccagcaaaagttattttatttaatcatatttatttatacttatcatgtaggataagttttcatatcataaaaagatttataacaacctatgacctatatgttgctgtcattaactgtaaaaatgaaaaaaatctaacatgtcatgataacacagggcgtaattaatggcataatttacatttaagttttgtttctaataaagtgtttaattacatttatttagaaagtgtttaattacatttaaagtgtttaataaagtgtcaaatatcccaaacaatcccaagaaagaaaaaatctgtgttcttaaagaaagaaaaacattttaaaaaatcatatacaagggtactttcgtcatttgatttatatctctgtctctttaatcctccactcatcataacctaagcaaaactctcttcacaacgtaaaaagcagaaacagagcttaaacaccaaaagagagagaaagagatctagaagaagaagatggcatgagatatgcgaagaagatggagaagtgttagttatacactaggagaattgtaagaagaaacttagcgcttcaatttctcaaggctcttttcgatcaataacgtgcaattcgtattttttttccggggtaagaactcgacttcaatgttctccgattcgtttgataaaggtcggattgtgatttttgagtactcggatcactagaatcgaaagtttacagtgtgatcgtttgatttttctgactcgaaacttgttgttctctgggtttaagaacatgaaaaatcacaatcgtctacatgtttaggttttttcaaaattagggtgatttcatttgtctacggtcaatttttttccaggtaatttgttagatagattgtgagagactgagactgaggattttggtgcacaacatccttgtggtctgttagaatttttgctggaaaaaatggagattgcagcaaagagtaactcgaaacgtatgtattcatggtggtgggatagtcacaatacccccaagaattctaaatggcttcaggacaatctcgcaggtatgtttctacttctagtgtatctttagcttgctcttttgttggcctatgatatatcatcgttaagctgatgatttgtttttttattattcttttggcagatatggatagtaatgtgaagcagatgattaaggttcttgaagaagatgcagattcttttgccaggcgagcagagatgtattaccgtaaacgtcctgagcttatgaaattagttgaagagttctatcgtgcatatcgtgcattagctgagaggtataatcatgctacgggcgtaatccacaaggctcatgagactatagcagaagcgtttccaaaccaagttcctttgatatttggtgatgagtcacatggtggtgctttgacaaatgatgttgatccacaaacaccggacatgcctcctcctttccgagctcggggtaacccggatgagttccaacaagatgctttggggttctctttatctcatgtccatgatgtaaagaggaatatagattttagtgaagagcctctgtttgtgagtaatggaaaagcaagaaagggactgaattttaatgatcatggagatggaaaaggaagaaatggtcttaaggatcatattctttccgaatctgaacgagctagcaaagctgaggctgaagttgtggctttaaaagattccttgtctaagatgcaggctgaaaaacaagctagcttagcattgtttgagaagaatttggagagactatcaaatctagaatctgaagtctctcgtgcacaggcagactcaaggggaattaatgacagagccgcaagtgcagaagctgagatccaaacgctcagagaaaccctctacaaactagagtctgaaaaggaatccagctttcttcagtatcataaatgcctgcaaaagatagctgatttggaagatggactctctgtagcccataaagaagctggggagcgagccagcaaagctgaaactgaaactctcgctttgaagcggagccttgccaaggccgaaactgacaaggaaactgctcttattcaatacaggcaatgcttgaatacgatatctaacctagaagagagactaaggaaggctgaggaagatgcaaggcttatcaatgagcgggctgaaaaggctggggtagaagttgaaaacttgaagcaaacagtctcgaaattgatcaaggataaggaagcttctgaacttcagttccaacagtgcctgaatataattgcgagtctaaaagtcaaactacaccatgctcaagaagaaacacagagtcttagccatgaaatagaggatggagttgctaagttaaagttttctgaggagaaatgtcttttgcttgagagatcaaatcagaatctccactctgagctggatagtctcttggagaaactggggaatcaaagtcagaagctcacagagaaacaaaccgagctagtcaaattgtggagctgtgtgcaagcagagcatttgcatttccaggaagctgagaccgcgtttcaaaccctacagcaattgcactctcagtctcaagaggagctaaataatttggctgtggaacttcaaaccgtgtctcagatcatgaaagacatggagatgcgaaacaatgagttgcatgaggaacttgagcaagccaaggttgagaacaaaggtctcaatgacctcaatttcactatggaaaagcttgttcagaaaaaccttatgctggaaaaatctatatcttatttgaattctgagttggaatcattcagaaggaagctgaagacgtttgaggaagcttgtcagtcactctcagaagagaaatcatgtcttatttctgaaaaccagcacaatgttattgagaacactgttcttattgaatggcttcggcaacttcggttagaagcagttggtatagcaacagagaagactgaccttgagggtaaggcaaagacgattggtgataagttaacagatgcagaaactgaaaatttgcagctaaagagaaacctgctttctatcagatcggagaaacatcacttagaagatgaaattactaatgtgaaggatcagttacatgagaaggagaaggaatttgaagaaatcaaaatggagaaagaaaagctgatacaagaggttttcaaagagaggaaacaggttgaattgtgggagtctcaagctgcgacattcttctgcgataagcaaatctcggttgtacatgaaacattgattgaagcaacgacacgtgagcttgctgaagcatgcaagaaccttgaaagtaaaagcgcatcgagagatgcggatattgaaaagcttaagcgaagccaaactatagtcttgttgaatgaaagcattaaatctttggaggattatgttttcacacaccgtgaatctgcgggtgaagtttcaaaggtaatttctcttagctatttatcttcctcagtctcccacttgtaatgttgattctttgatcagattgaaaccgttttgaaagaactgatgttctcatctcttttaccagggagctgatttgatggatgaatttctcaagttggaaggtatgtgtttgagaatcaaagctatcgcagaagcaataatggaaaaggaaaagtttttgatgcttgagaacactaatacctactctatgcttgaggcgtcattgaaacaaatcaaagaattgaagacaggaggaggaagaagcatgaggaagcaagatggaggaagtggcagaatgcggaagcagagtcacgaaaccgagatggtaatgaaagatattgtgcttgatcaaacgtctgatggatcatcgtatgagattgtaagtaagaaagggaattcggagttggatcatctcggttttgttgagctaaagccagtgaagactcacaagacagaaactaaagccttgtctgaagagtcactgattgtcgagaaagtagagattttcgacggattcatggatccaaaccgtgaagtaaacaagagaagagttctagaaagacttgattcggatttacagaagctggagaatcttcagatcactgtagaagatttgaaaagcaaagtcgaaacagtggagaaggaaaagacgaaagtaggagaaaacgagtataaaacgatcaaaggacagcttgaagaaggagaggaagcaatagagaaactgtttactgtcaatcgaaagctgaccacaaaagccgaatcagagaaggatattgatagaagaaggagaatattcgaacatgcgaggagaggaacagagaagattgggaggttacagtcggagatacagaggattcagtttctgttgatgaagcttgaaggagagagagagcatcgacttaggtcgaagatttcagataccaaagttcttcttcgagactatatctatgggagaactagaagcgtatcgatgaagaaaaggacgaagaagcggtctgtgttttgtggttgcgttcagcagccagagtctccttgaagttattaaaactgttgttacttcactcgcaagtaaccaatgttaattgtttaactgcgtttgcgattatgtttttgaacgcagacgcggtagtaatagtgcgtttaataacaacagacttgtttttcaacttcttatttcttaatgacaataaaactttttagaaatgtgaaattttcaatatgaaatcttaaacgttgttaaattccggtaccggcgagtcgggtttagccgtgtggagcatgaaatcgcaagctgcgacggcttctgccaccgtgagataaatccgttctttaccaatgctctcaatgaaggtggacttgcttagcttcttcatcacctctgctcccgggttcgctatcactagctgagaaaattagaagaccaaatcgtgaaatcaataaatgtttaggtacttgtcttcaaaaaatattaccgctcgtgtcgatgtcatgtgtacgattgagtataagaccaaatcgttaaatcaataattaagggcattttaccttaagctctctacgtcccaggattttgttgagttcctcaagcatgcttataccgctcgtgtcgatgttccccacagctaattcattgacatatagaaaaaaagtatagtattgtatgttgtatattttgaaatccaacatttatactaaaaattaaaataaattgtagcgataaaacttttaaaaatcaaatttggaatgtcacaaaaataaaattatcaaagatagcaaaatttgcttgagactgatattatgatccaagctaatataaagtttcttaccactcatgtcgagtacaatatattgtagactgatatctccgctagttctcaatttatcttcctcttcatcgatccaccttccaattctataaaaatattatacataagaaaaagattaataagtcacatacaaataactaagattcaacaatcatagcctataaagatgtatcaatgtataaataacctgtctcgcaagtaggtagagttggcgaagtaaataggaccatcgatgtggagaatgagaagagaagagcgagtgatggcttgagggtaatgctcaatgttcctatatatttctgagttttgaatgtttcccattacataaatctttggtcttcccacgaacaacactaacctcatcactgatattcccacctattgcatgattctagttttttgttgggagtggcacagaagagtaagtaatgaaaaagttaggatagatatacgtacggagaggatgagaccaatttcgatggtaccaaaaacaacgcccaagtaagcagagagacaaacgaagaaatcgaacttgtcgagtttccaaagatgaatggctgcttcgtagtcgactaggcctagcatggcagcgattatgatcgacgacagaactactaatggcgtgtagaagaataacggcgttaagaacagtaacgtcaccgccactgcaaccgccatcaccacgtttgataacgccgttttgcaacccgcgttgtagttcaccgccgaacgtgaaaatggcccttcaacataatgttttggcttaaataccatttatcaacatagttacgtgtttttttcaaacctttaagagtttaatactaatcattatgttttaagagaatataatcatcatttgataccaaataagtctctaaaaacaaaaaccaaaaagagatcatctcaaaactacaaccattcaaagctatatacacaattttttttcttctaaaagattttaaagatcaagtaataaggaacagaaggagtataaaattaccggtagtgagatagcaagaggagaaggaaccaagaatgttcatcatcccaaaggctatcatctctttgttcccatctatattgtaattcttgtacattgcaaagcttctccccactgctataccttcctattttattttttaaaaacaaaatttattacaaccaatttaaggactcaattggtcgagatttaattaatgaatacgtacagcgagagctatgactccagtgataatgccaactttgagagccaacatgacataaggtggcgtgaaaaccaaatgtgtgattgacggtggatttatccctttctttagttctccgatctacttccccaacaaaataaattattagtacattttgtagtattttaacagagaaaatatttcgtttggcgttaaaagtttataatgaacaacacattttgtttacaattttttttcataaatttattaaatataagaacgtaaatatgcaaaggtaaatattcgagtctaattgtgagtacttagccgtagaggcaaaagaaaaggagaggaaaaacgtacaaattggataccatggaattggtcatggaggaagtaaaggaaaatggttccaaaaatgacagaaacaagtggagacattgcagatatccagaacagctttggtctcttcttgctcttcacttacataattgatactttgttaaatttaaatccaaaacgtatcttaatcagtacgtatatacatagattaaattaacaagttaaacttacaatgtatttagttgtaagaaggaagattaggaagcaacaccctagcactccactttcccatctccactgcaaatattaatactaattcatatatatgtacatattacttaaaactcttttttcacatttcgacaaatgatgaaacgaaccatatgagattgagaaaaaatggagcggagaacagtgacgatatcggtggaatgagtgaaatgatggaggccaagtaatcctttcagttgctgcagacacaccactgttgcggctcctcccatgaaccctacaatcgccgcgtgcgacaatatctccaccacgaaccctaacctaatatcattcactaaactctttatcaattttactcataattactatataacgtatgtgttttgtatgtttgattgatttaacgtttattttgctagttttgttcacgtgaaatttgtttgtaaatgttaagactaaattttataatcttatcatcttctgacatatttgcctcagaatcgaacatggaacacatcaactatatgtttttgttttcttcttgttttctattttgtatagactatagaatatacatttttactatttctaagaaaaacaaaacagcatgcacagaccttcagccgaaaaattgttcccttctcactttttaataatgaattaatgatattccctccgtcccactaagatgaattttttaaaaatttcacattgtttaagaaatattgtataaagacaattttaacctcttaatatactttaaaaataataataaatatttatctaattatttagtaaggataaaacgggaaaacagttttaaaatttgcattggaaatataaaacttctatctttgtgggacaaatatttttcctagaaaatttatctttatgggacagagggagtagaccactagaaaacaaccagaattgtaccaaaatatacaattaatactatacaaacacatgcatattctagcggtcatttaatttctaccacgactgttttaaattgagtacgtaataatgattccattatatgtaaaccaataatagacatcgatatttcacgtttatgtctgaaatgtttggattgttacgtaccgtaagaggccaaggcaggtttgcatgagtccggcgaagaaagtggcggtgaaagctaagtgaaggtaaagctttggattcaccactgcgtttacctctttccccaacatcgcagccgtcaacagcgaggccaccgccactgttcccaccgctaaatctcttgaacttcccatgatcgcgtataccaacggcggcaccaagctcgagtctatacatttatttcccatataaatataatatatatagttagttaaagctatataagttagttatagtttatatgaaattacatatatatttaggaccaaactaaatgaaagaaaaaaatggaagaaactttagatttgagtttggtgggttttttactcaaaaccaacactgaaatgtttcgtcaagagttatttttctatggtaaaatcattcacatatagcgaaagagagagttgcaattgtgaaaatttattagaagaggaaaggagcctacaaagaccaaggattggagggagattagcgagctgagcatagctaatcccttgaggaatagcaagacttgcaattgttatccctgagataacatctgatttcaaatactccaaactgtaaccacgagcccattccaagatagggaacacgtgtctcaaccctaactcgatctttttcgacgttttcgattcgttcctgattctacggaacggatcgtcggcgaaaaggatctcattgagagtgttctttagtgatttcaagaaaggttgtggtggagggatttctacttggtgatattgtgatgcccttttgctgctcatcttctagtttaactatttaatttggattaatgagattgatcaaaagctaataaagtctcatttggattttggaagtgatgaggaagagagaaggaagatagggtttatataggaagggaacataggtgattcatgattgcattttcattggacccacaaaattattggtctttgttttgttcatatctagagaacaaaaccatggtaactttattttgaaatggtcataagaaaatattgcaatgtacgaatccagaaatgcttgtaacccataattttgttaagctcattgagaaaatatggatccactcttctgtattggctacacatacatttcaccgtaatgtatcatcatcctatttgcattgcgacctatatatatatccagttacatatagaaaaaaaaacaagaatgttaaagggactttcacagttaaatgtatttttttgtgtggcatttttgtatattggtcaacacatacatttcaccgtaatgtaacatcatattttgcattgcccccaaattctacaaatccagttgacaataatagttataattcaatgatattgttatgttgatcgagaatatggcgtgagccttttttcatcatagtaaagaatatgggtcgaaccctcacgccagagaccacttgcccattatcctccttggcttagtggttacacacatacatttgaccgtaatgtatcataacatttgcattgcgaccacaaagtccaaaatccagtcacacatagaaagaaaaagaattatcaaaggaatttgagtttctaaatctagttatttattttcctacttgttttcccaaatttagacttatgcgaagactaaataattaagatacatgattaaaacgaagtagcagcatgagctgttacaacttacaagacttccccaatttggattgatcactctcgttaccattattgttttgtccatttgcatttggagcattccagaatttcaaacattcgtttcccttttcctcaacacacacttcgaggcttcccatgttttgcttctctttttgttttcaatatcaaaatattcttcattttatatcaaattgtaaaaataatctgctttccattactaaaattgtcaaaatttaaaatccgaaactccaaattctacacctaaactaaactctaaaaactaaaccataaatcctaaacccttataactcttattttttttaaccataaaatgtaatatggtctacataagtttgaaataaatattattaacaaaaagcttcaattatcccttttttcttatgagaaaaaacaaaagacttgcacttctcgtggtgtctttcgcgacattacacacatgacacatccttggcattttcgttataaattattacatgatccacagttcctgtgttccctctacaatcactcacatgaacatgtgaactgtaaccacaaaaatgtacagttttattttcttatttacatatttttaaagagaccgataagctaaatacctcatcctaataatcatcatctctgtaaggctctcaacacagtaagaagatacaagaagaggttgatgatgtctaggtagagtgaaaccgctgcccaaatatactcatcatacgtgtgtctcttgatcagattgtctgtatcgtaaactatgtatccgcagaatattatcgataccaaacaaccatagatcatcactgataccctccctaatgggaacaaaatctgcacaacataccccaaattaagttacgaaacctggttatgcaatcaaaaagctaccacatttaaaatcaagtttcaagtttctcattttatgcaatgcttatagtgatatcaagtgtcaaattctagcctaaagattactataaagagcaccacattcaaaaagttaaaagctctcattctctgtactgcctttagcagtgacaaatcaagcctttctaatttctaagtgtaaaacaatgctgccaaaactaacacatttcataggctaaatcccttatctgtaatgtctaatgtgaaatctcacttcttagtctcgtaaaaatgctaccatatccgatacgcttaaatcttgtgctctctaatgtctaatataaaatgaagttgttaactgtttagcctaaagaatgataccaaaactaccacatttcataagctaaagactacaactctcactctctccaatggaaattggaataagtagctttacttgtattaaggcgaagaaaataagcacggtgagagcgccaaacaagaagggtccaaggaaattaaagtcatatcctttcctagcagcccaaaaagtatataatgtgagcgaaagcaccactaccgatgtcaagatcactgactcgagaatcactttccctgtgtccaacacagaataagctttaaacatatacacaatcagaatcatagaaaaaactgagagatgaaatttgctaagagctagttccccaatagcaaaaacagaactttgttgcctaatggatccttaacaggtaaccaaaagtggttgatcaagtcataccattggtgaaggcacatgttaatccaacaacaaaagccagagccaaagtgaaaatccccaagagcaagtaattcaccggatgtttctgatggtaatagtacaacggacacaacactatacatcggagagaaacacaaatccaagtttcagcttttgagattattaccaaacttcgaaaaagattgaaacttttgatttgtaaaacaagtgtgcgtgatgattgtacctatgagaggtgtgatgatgatgactatgtaaagagctaatccaagtccggtggtggcgaagaacagagcgattggacggacggtgaccaccgtggcagcgacagcgacggtggctagaagctgaaaggcgattatagagtagaccttgcgtataaatccccaccggagctcgggattttcatgcatcgctgggtatagtaaaggccttcttgagctaacgcctgtttccacgtcatctttccggtacggtaagttccactgatacattatttacgatagcagagtctttataaagtgaaggaacgcgcgggaaaattcgaatcctttcgattactactgtatcacgatctacagagagagaaccacaagcgagagagaaaagttgatgcggtgctttgcttgagcttcttcggattttcctgggagaagcggtgatgccaagaggaagaagaaagttcatgaaagctctcggctaaaccgtagatgacgcgtggcaaccggagatgtcgcataagcggtgacaaggatttgatgtgtccaaagggaaagtgttcttttttttggctcaacacaatacttgcttaaccaaacttcacagtacatttcaaatagtaacgaaattttttatatatatatatatatatatatatttttattactatttaaaccgtacaatattttatctataattaatttgcatttttccaattagaacttaactaaaaaaaattagttgatcaatagtatcattcttgcatttaatatagagggttttcaatcaatatatgtaagatatttttaatcaattatttaaactgaaataattaaaagtaaaaattgatttgaaatttggataaaaagtaaacaaaaataaatttttagagaaattaatttgggatatattttcatcgttgataaataatattgaaactgaaattacttaaaatgatgcagttttaaattttaacgctagtttttataaactttttttttggttttggtggtgttaaatgattgagttgatagtttaacttgttaaatgaaaatataattataatgtagattcttgactaatcatagtttatatttttaatcgtaattgagacacaaaaggctgttatgcttgatcatttttgtatacattattgtagaatgtaaaaacttataattaatagaaaaaataataatttagttcaaaaaatagaatttttcacaatctcttgaagagtggcctaagaatccgatagtggtggttactgtttgtgttgagatatagcatatgagcaaaaacaattgaaaagaagaaaaactttcccttttaccaatgaaacaaaagagctctcagataattagaaaagtgtcaatttgtataacatttcccactctctctctcacttcgattcacttttgctcaaacttgacaacttgtccgaatctgtccatagcacacctctctctctgttttagggttttctcttcactggtgctttcttccttgtctcgctggttcaaagattcttactttttgatgtctaagacatcttagatttgttagactctctttaatttttctgggtttagccactagattatgttatactgctagaaggttagggtttggtcgagaaagctctaattttggtgatttatcctcttaatttcgcaaagggttatcttttcaatggcaattgcgagtgagttttgttattctcacttatgtatttagtaattgttccgtcagctgtacataagtggttggtttcatagagaaatgcttttagctttaggtgttgtaagatctcataataccaaagttcagatttttttgtataggattccattaagtagcccatctccacttagtttctggtctgggtagtgtgtaaccgacaagaaaatagtgttttgactatcctctggctatcctggagatctgggatttgtttcatctgttatgtcagatgaggactttttacccttctgattcttgtaaagaatcacaactcgattccttgaatccacagtcatggcttcaagttgagagagggaagctatcttcctctgcttcttcatctgcgtaagtttcatttatttttcttgaactttgagatgttttggatatggagtaataatatttggtctttttgtagtccactgtgtagagaatcatttatcaaagttcccgagcctcagatactgccgcattataagcctctcgactatgtagaagttctagctcagattcatgaagaactcgacacttgccctttgcaggagagatcgattctgtatttgttgcagtatcaagtgtttagaggtcttggagagaccaaacttagacggagaagccttcaatcagcttggcaagaggctactactgtccatgagaaagttgtgtttggatcttggttgaggtatgagaaacaaggagaagaagttatcacagatttgctttcctcttgtggtaaatattctgaagaatttgtgccactagatattgcatcctatttcccagctactactgcttcttcccctgaggcagcatctgtgaagacgaaccgcagtgtatctaaaaatgttgtgtttaagataggagaagagaagatagcttgccaaaggcggaaaattgcgagtctttcagctccatttcatgctatgctttatggtaatttcacggaatcgcttcttgatgagatagatatgtcagaaaaccatgtatcctcatcagctatgcgggttgttagagatttcagcgttgttggtgtactaatcggagtttccaagaaccttcttttggaagttttagttttcgcaaacaagttttgctgcgagcgacttaaagatgcatgcgatagagaattggcatctttgatttcttctatggaatgtgccattgagcttatggactttgcacttgaagagaattcccccatcctagcttcatcgtgtctgcaagtttttctttatgagatgcctgatagtttgaatgatgagcgtgttgttgaggttttgactcgagttaatagatctcaagtctcaaccatggcaggaaaagctccattctccttatattcttgtttaagtgaagtctcgatgtgtatagatcctcggtctgacagaacactcggtttcttggagaaattagttgactttgcagaaaatgaccggcaacaagtattggggttccatcggttaggttgtatgaggctattgaggaaagaataccgggaggctgaagaagcttttgaaacagcttttaacttaggccatgtgtattccgctactggtttagcaagactaggatacatccaagggcatcggctttgggcttatgagaagctaagctcggtaatctcctctgtttcgccgcctctcgggtggatgtatcaggaaaggtctttctattgtgagggtgacaagaaattggaagatctcgagaaggcaaccgaattggatccgactttgacatatccttacatgtatagagctgtcacacgaatgtcgaaacaaaatgctaaggctgctcttgaagaaatcaatcggatcttggggtttaaacttgctttagaatgcttagaaattcggttttgtctttatcttggtatggatgactatgaagcggctcttcgtgatattcaggctgctcttacgctgtgtcctgattatagaatgttcgatgggaaagtagctgggaggcagctccagacgcttgtgtatgagcatgtcgagaattggacaaccgcagattgttggatgcagctatatgagaaatggtctaatgttgatgatataggttctctttctgtaatctatcagatgctcgaatccgatgcttgcaaaggtgttctctacttcaggcaatctttgcttctcctaaggtaatttttctaaataaaggtgttctttaccattatttaagcatctcattgtcatacctttgttttgttcaggttgaattgtccagaagcagcgatgcgcagtttacagttagcccgcgagcatgcctcaagtgaccacgagcgtctagtttacgaaggatggatcttgtatgatacaggtcactgcgaagaagggcttcaaaaggctaaggaatccattggaataaagagatcatttgaagcttatttcctccaagcttatgccttagcagaatctagccttgatccatcgagttcttctactgttgtttcacttcttgaagatgctcttaaatgcccctctgataggttgcgcaaaggtcaggtacggtcgttcaccatcagtacatccatttgttaatcagtgaaaagaaaaactatgcttcaggttgatagggtttggtttagtcaggattagccaattatgttactgcctggtttttgtgaaatgtccactttggttttggcttgagtcgatttggttttgtgcttatttagtctatgaaaatgctatttgtttttgtttttaggctctgaacaatctcgggagtgtctatgtcgattgcgagaagctagatttagctgcggattgctatataaacgctctcaaggtaagacacacgcgtgcacaccaaggtctagctcgtgtccatttccttagaaacgacaaagctgcagcctacgaagaaatgaccagactaatcgaaaaggctcaaaacaatgcatccgcctacgagaaaagatctgagtattgtgatcgtgaactcgccaaatctgatcttgaaatggtcacccggttagaccctctccgggtttatccttaccgatatcgcgccgcaggtttttcttcacttgcaactcttatgctcctttttttgttcatcatctccgaaaaataattggcttaaccgaaacttgattattcgttattcttttgtgggttttgatagtgttgatggatagtcggaaagagagagaggctatcacagagttatcccgagctatcgcctttaaagcagatcttcatcttcttcacttacgagcggctttccacgagcatatcggtgatgtcacgagtgcgttgcgggactgtcgtgcagcgctctcggtcgaccccaaccatcaggagatgctcgaactccatagccgtgttaatagccatgaaccttgaaccgcaaccacacacaaaagagcttcgatatgaaagtaaagtgtgaaaaattgtaatactaaaagaatcattgttggaaacttgtaatctcttgtaactcttttattctttgttgctgttttccatatatcgatttcgtattttgtccttccatcgtaaacttcaaatttctctgggcctaaaacgtaaacttgatttaaaacaataagtagatcgtttgagttcttggtgacaaacctaaagcattttcctttattattcttgcacctaataaagccccaatgagctatcttattttcaagctttaggtttgaaaatgtgaaaaagctttgggtttgtcaccaaagactcaaatgatttcgattacgttttatagaaggttgaatgtttgtactcttgttacattaacccatgacatacattacatatacatataatatataagagcttttactacaagacctattaacatgggcttagatgggcttctagagttgtagtgttaataacttgggcttaatgggtactataatactgatgactagttttctttgtcctcaaatgatctagtttcttccctgttttactttaaaatataaaattttccctttgtttgttacaagaattcgaatattcatgtgtttatttccttcgtatagcatatatattttcagaatatttcacaattcaaaaaagcctttatgaaaattttaaaagaagaatattcggtgttgcatgggttttagttacgctcgtgtctcataatggtcacacgttttgttttgttttggcctaaagggattccatcataaactgaattttactacagtagacacgcctatcccaatgaatcaaatggtacaagacacgtctaaggacaaaatcgacttaacaaaatgttcttcattggaatatttttctatagaaaaatttcaacagataaaaagttaaagaacggatgaaagagtgcgaaaaattcttgttggtggggtaagtattttctttttggacatgaacaattttcaaagggatatattaagaatattaatcaaaaacttataaaggttggaaaaaaaggaagaggaagatagcacaaagccacaaagtcatccacaagagtaaatcatatgaagacgaaacaaaattcaacaaagtgatatattccattttgatattcaaagccaaaatgcttttagggcattggttgctttgagtgtatgtatttttctcccctacaaatacaactctcttttatctttgtgagtgattcaaacttaagttaggaggcatgtaaggatgttgtataatcagaatttaaatttaaattagagaaatagacaataaagttgtttaattcgtctttagggcgaaatagctttaaacctaaatttgttttttttttgttagaatctttgtatgatgttccctttttacaatgagtttctatttccttacgttgttttaatttattttatagcttatgataagtttcattcaaatcagtgtgcctttttaagaattttgggtatattatgggaatgagagaaactataaggaaaaaaaaagataaagctttagcagccttggtagagaaagtaacatcactcaaattcataataacacacaagtaaaatataataatatttaaagacaaattcagaagaaagttatagctttttctacatgaaataaaatcgaactagaatccctagctaaagtaataaggaaatacaaatagaaaatagcacaattgaacaagtatacttatactcttggcaataagtcaaacaatttcatcttggatacttaattttccagtagatagtttcctattagatattcctcaatggttgtattactaaatttagttcttctattataagaacaacgtttattttggctaagtaattgtgtgtttagattctctttacaaacttaaacaaaacaaaaaaagtttccattattcaaaccccaataaattgaaaagaggcacacttttcttgatataaaagtgattattacttccatttaaggaaattaggcctgataagtctcatctcacaatattttccattaattgcacaaattgatagcttgctttttttctttctgggtctactcttcttttttagtagacaatttcaagtaaatgcttatagtctgaacctgtaatcatcactcttctctgtaatgcagaacacttaaaaaattacataaaataaagaataaaactgaggaataaaaaataaaaaacagttaaagatatatgaaaacaaagtcaaagtctcactttcaagcacaatctctttcctctgtggtatttatctgcacatagaaaaactaataaaaatgggaatcaaacagtctttgcatttattgtaagcacacacatatatgtgtacatgatagtgacattggagaataatccatcatggtcgtcttcttgcttttgagactatacatatacatgtgcattatatacactactcaagtaactaaattatttaattttgcatatatagccaaagaatgatgtctttctgtgtacacttacttcttactctctaggtacttgcagttccttattttaagagatcagaagaaaccaaagtttggatctttttatagttttcttccaagttttgtttttgttttttcttttgttggagtttccttcttcatatagctataaccatatagctagccatggatatgttttcttctcattccttgtcctataagctaagctctttgtctactgaagcaagtgcctcttctggtaacaacacactcagtaccatccaagaattcagtggctttcacaatgtgatttctagtgtttgtacacacacagagactcacaagcctaagaaaaagagaggccttcctggaaatcctggtaagaaaatagtactttttttttttttttttcatttggaatcctgaaaaaacaaatgaatcaggatactgtctttgattcctggtagaatcttggaacctaaactttttcttatggggttttgcaaaaaagtcttcctttttttaatattagggtttgtgtgaatatcatctttttaccaagactatgtgtttgagactttatttttcatgtgaaactggtttattatgtggcagatccagatgcagaagtgatcgcattatcaccaaagacacttcttgcaacaaacagattcgtttgtgagatatgcaacaaagggtttcaaagagatcagaatctacagcttcacaggagaggccacaatcttccatggaagctgaaacagaagaacaccaaagaacaacaaaagaagaaagtctacgtgtgcccagagacaaactgtgctcatcaccatccatctagagctcttggggatctcacagggatcaagaaacacttttgcaggaaacatggagagaagaaatggaaatgtgaaaagtgttcaaagttctatgctgttcaatctgattggaaagctcataccaagatctgtggtactagagattatagatgtgactgcggcactcttttctcgaggtaacccttttttaatttttcatttttttgttctttatgtcaagttctttctttgttccttgtctttcttgaaaattttactgatgtttctgtgacaaatctaaattattgtctatctctatagagataggagtcaatagtttttcttggagtagtttgatatatatagatgaatttaatgctttcgtgtgactgatttcaattgtcttcttttggttatgttctttgacaaatctgcttgtgactgtccatggaatatagtttgagtgcaattaaatgcagtggcaaaattcatggattaagacattatatttacatgttggccattattgcgtgtatatataattttttttttttttacataaatcacttcacacttttttagagctaatatgtatgtatttgtgtaatataaattaattcttgtccaacaaaaaatgattttttaataacattatatgtaaaatttgtgttgatttaatgaggagataaaaagaagcctgcaggtgaatcttctccttcatcatcataatagtgaaaaagaatcttgatttgattttgtaatttttttttttgtaaaaagattttgataatctatgatttgatttgctgtgtgtaaaattgcattggtccatcatgacataataggcttcaaaagcttttctttgaattttgaaacttctttattatctctgtatggtccactccaaactatttcactacttgcaattgcatcattttatttttggtttaatgttacaattgcatcattattgatcatacatacatatattgtttatgtttctatctaatatttgtttttgtttgtttgtgatatatatattttataaacaggaaagacactttcataacgcatagagcgttttgtgatgcattagcagaagaaagtgcaagactccactcaacttcttcctccaatctcacaaaccctaaccctaatttccaaggccatcattttatgttcaataaatcttcctccttgctcttcacgtcatcacctcttttcatcgaaccatcactttccaccgccgctctttcaacgcctccaacggcagctctttccgcgacggctcttctccaaaaggccacctctctcagctccactactttcggcggcggaggacagactcgatccattggtcatcaccgacatttgacgaacgtcaacgagtttcttggtgttgaccgagtcatgatgacgtcagcttcttcgtctgagtacgaccagttagttgttgatgggtttacgtccacgtggcagaaagctgaccgtttgaccagagactttcttggactcacgggtcatgggggacacgttagcgtcagacctggggatatgctagagtacgcgggtggagtggcgtttcctatgtcggcgtacgataccgaatctcatgatcactcgtttcagaaggcttacgatcatctgggattctcaggggcccatcgtatgtaaaagggcaaaactggaatcttgttactttctttattttgtttctctcaaattacttaaataccctcgtggacaaaaaaaaagacacagagcatttctttctggggattattaattttctaaaattgttgctagctttgaatttttgtctcgtttacgttggattttcttgtaaaaatatattcgtacaaggaagtaaggaacatttagaatttccttagtcaatattatgtccgttaaaaaacctaaaaaagtttttacttggacattacatgaaaaatcaaaaataatatgattttccttaaaaaatggatcggtaaaagtcccacaaaactgcaacgtctctagggattgacgaatgtgtcctctcaaagccagcttatttgactgtgatagatactatacaagtatacaacttctttcatcatatccacgttacatgtatacatcatgtaatatgcacttttgtcttctgaagatatatattgccaatcttatacacattgagaaatacatattcatcgtaactcaaatttggcaataggtgtcgacaaacatatttattgttgttctgattgttgttaacaagtttctatcgtaatcactaatcagtgacaaggagcttatactattgatggtcatttatgttgccactatggcattagtaacgaacactaacatgtatgtatcattttcatactgtgatgaatagtcgctataccaatcacaattaatttagtgacaaatcattacaatcttatgtttttttttaatagacggtttaattacgtaccacaaaatcaaaaggaactgaaaacacataaagatatgagggtgaggaggaatcaaataaaaaagatattatatagaaaactacgaggaataatataaagtagaaaagattaaagaaacgaattaggtcaaagagcttgttgatgaggacacgcatgaacatgcgaacactttaaaaccaaaaaacgaaaacaaaaacaagaacatgcgaccactaaaaagttaaaaagatagattaaaagaacattgttaatggtatcaatatagtttccttttatgtttttacgagctcttatagtccccattctatacaactttgttttgctttccttttttcttttggcttgtgattggaaattgaaggttggtataaaatgtacaattcagacatcttatatatctccagagtatcctttggtttggctgatatataaatgatttgcaatactgttatgatcattgtgtattgaaacttaggatgtgattggtaatcgtgggtttaataaagcaaaaatgaaaaaaatggaaaataaagaaaataaatatttaaaaatcagctcaaactaagtattctttggtttggctgatattagtatagtgagatgatgaattaatttaaaatatcatctcttttctgtttttttctaaagtcatcataaactattctcatgtagatttgaaaccagaagataattaacacaacacaaattctattacaaactactagatacattctaaaacattctacattagagaaaaatagttggtatataacactcaagcagtcaagctatttcaaaataattggtacaacaacatccatgattaaaaaataacaactatttgggttcctaaattttatctttaacaatcaagctatttcgaaattttatgcaagtaatttcttaatagttaatagtaatataataattacgtctagatggaccccaatgataatttaaagacttccgtggttataatatgaaatagaaatatttcaggggcaataatgaaaacaattaggaacttaattataattagttttgttttaagtatctattttagggaaattaaataaggaaaatcgcgtgagtgagggagaaagtgagacgactttgactatgtttgaagcgagaaacaaggcgcggagacacgaagacgatgatgatgatgaagaacacagcacaaaaaccaaacgacgaaattgatatttatttttttatttcgttaatcgatcaatgaaatagttttcttcagcgtaaatcgatctctaaatctcgattttctgcgttctcctttcaaaatctgtttcagtattcttctcagattatcaaggaggaaggagaaatgaacttgttgttggtggtgtgaatctcgctaatcgcaattttggatcttagattttgttcttgctaccaaaccctaatctcacacattgcaccagcatacatagttttgatgtctgggttgttgttcgtctttattgattccgtttccttaatcaaaagaaacgggttgatttctgagccccgattcggatccgggtcgtgtccgaccgattcaggagtggttatcggatgaatgaatctggaatcgaaactgtggaacaatgaaatggggaacattgcttaaggacttgaaggataaggtcggagtagctgaaacaaccgccgatttaatcgccggagaagccatcagtgaccccactactccaccgtcctcttcccaagcttctccatcctctagtttcgccgccttagctcaacatgacttcaatttattatctcctacaaggtattttacttttataatgtgcactttgactgatcaatgttggtataagtaaatcaatgattctctcttatttactccttgaaaagccgagacaaacttaagttggaattggacttcaagagatattgggaagagttccgttcatcaagctccgaacaggttcgtgtatccattcatgcttttagcttatgtacctttgtgttacgtacaatcatttattgtgttctgataaaaactacactggaaaatcactactgctaatcattcatatatgtcacaacaggagaaagaagccgccttgaatctgagtgtgaatacgttttgtagactagtgaagcagcatgctaacgtagatcagttagttaccatgtaagccatttcttactctctctttttctatttgtatggattcataatagctagttttagtctttgcaagggaaaatttgcatgtcaactagaagataaatgtctcttactctccacatgatttagaaagggatcgtacatttcctatcttgaacgttcttcttcgttagagtctcttttgcactttcgtttcctgcccagatatcagatatgagaatagtaaccgtattgagaatttaatttcaattgcaggttagtagaaccacatatattctcattcgtcattggtagagcatttgtggcagatgttgaaaagttaaaggttagtagcaggaagaggtcattggatgtagagaaagcaatagagtttttttctgaagtcaccaaggtctgcctttccttcctaccacagtgaatcaggacatgttattgttaccttctcttctctgttagtcatgattttgttgtttcctgcaggatggttcaagtcatggtgcaaaccttttaactgctattgaagtccttgcatctggggtaccttttcgacttctacatgtctttcagtttttccctttgttaaataattttacaaaactcaactatgagtttttactgtttaccaatttttttattgagtctaatatctgatagctaactggtagttattctcacatgatttttggaggccatacaaaaccgtttagggtgatggctctttgatggcttatataataaatattgcattggtccttttatgtgttttcttttcagcctttcgacaaacaatctctactggattctgggatattatgttgtttaatacacactttcaatgcgtttctgacatacagtgtagccagtgaaggtgaaaaaactgttaattatgaagaaaaggtaaatatgaaagatgtagtactttccaagttagacacttgaggttcagtttcaatggtttaacacattttttctacaatataactgtttcatgctggccaaagtgtacactcggcaatgccttatctgttgagactttaatgtatcttcactcttgcaggttgagggcagtgttgtcaatatcatgaaagcattggcaagccatccttctgctgcacagagtttgattgaagatgactcccttcagctacttttcaagatggttgccaatggttctctcatggctttctctcgatttaaagtagggctggtttcattccataacatacagcttcacaaaaatgcaatgcaggtaattggttgctcacctgttctagaagtcgagcaatgacagtgtgtgttgaaactgaaacagctgcgaacttttctgtagcatgaccatgaaacttgagcgaatgttgtgatgcttaaagttccatttcgtgtctctttcagattcttgggcttcttcttgtcaatgacaatggtagcacggcaagctacatacgcaaacaccatctggtatgccattgtatcctgtagaaagccttactggggaatgtatattcttgttttttttttgctaatgttcaagctatataaggtctcccgtgataaagaaattggttgtcaggagacttttgttaatttactagagtatgagaataaaactaatgataagtattggttttgtgcatatatttttgtttgtcacaatctgagcattgccatatgatagctgcaatctggtgtttaaatggtttcttttgtgatgtttacagtaatcttcaaaccatttgacggagtttctaagaatgcttgttcttggtttgtgaactgaaaatctatgttaggaagctagatcgctaggaaaactgcctcagatagattttgtgactaaggacaactatttggattctgtatagcgtgaaaaaggcccgcacctattatttgtttctgctacatctaaacggggctttttaacaaaaattctggcacaagttagtggtatgactgcttgttctgtttcgacgtcttccgaactaattttttttgctgagttcttctgcagataaaggttctcctaatggctgtcaaagattttgatccggattgtggggactcagcttatacagtgggcattgtggatttgttacttgaatgtgtggaactatcgtacagacctggtaagttcacttagacaaatcataagaactcaaaatatgtcaatgcttgtggaaaaggtagtagagagtagaaatattcggtagtcaccttctcagtttggggttggtaaactgctctgattgtggttgctaatgtttcttaaattttgactaatgtagaaactggtggagtcaggctcaaagatgacatacgaaatgcacatggttaccacttccttgtacagtttgcgctgattctatcttccatgccaaaagacattgtttttgcgttcgatcattcatccccacacaaaaatagaggttccaatgactctaaaaaacagccacccctttcactgaaaactaggcaaaatgacgactctgaaaaacagcaatccctttcattgaatagtaggcaaaatgatgagtttgctttaaaacatttctcccctgcactttccagattgcttgatgttcttgtcaccttggctcagactggtcccattgagtcatctggaacaagtacctcactattgtcccaaacaaagctcactgggtatagcaggagacaaacaccatctgccaacaatcggtatgatgagccatgtgaacagggaagtggtaaagttaaagaccttgaagctgtccaaatgttgcaagacatctttctgaaagcagagaacaaggatcttcaggctgaagtgttaaaccgaatgttcaagatattcacgagccatttggaaaactacagaatatgccaagaattaaagactgttccacttctcgtgctgaacatgggtggttttccttcctccctgcaagagttaatcctcaaaattcttgaatatgctgtcacagttgtaaattgtgttccagagcaagaactattgtcactttgtttcttgttgcaacagcctatcgattctgagttgaagcataccatactttctttctttgtaaagctcacatcttttgatcaacagtacaagaaagtcctaggtgaagttggtgttttggaagtcttacaagatgatctgaagcagcacaagcttctcaggggtccagatcagtatagtggagtttctaatcatttggatcgggtacctagctcacctagcttcaaacaacacctggatagtcaggatgccatcatttcatcaccgaagctgatggaatctgggtcaggaaagttgcctatatttgaagttgaaaggactataactgttggttgggattgtatgatctctttactaaagaattctcaagttaatcaagaagcttttcgttctgccaatggcgtgaccgttattcttccattcctgatcgctgatgaacatcgtaccagtattttgaggattttttcatgtttaatcacaggagacattaaacaggtaagtctacattcaaggaatatgtatctcgatattctatattatacagtgtgttttcttgtttctctgatctacaaagtcaaattctattagcttggcaaggcttttaattctttagatcatgccgccactaatgaggtttctgttgcttaagtattataaatccttgagtttctgtaaagggtaactcgtatctgacccgtcattcaaccaggtccatcatgaagagttagaagctcttatcgatgtgttgaagagtggaatggtcaccagagtctctggggatcaatacaagcttcactatgaagtcagatgtgatatcatgggtgctctgtggcgtatcgttggggttaatggctctgctcaaagagtctttggtgaagccactggtttctctcttctattgaccacccttcatacgttccaaggggaagaagagtgtagggatgagtctcatttgatggtttacatcaaattgttcaaacatctattgcgcctcataacaactgctgtctgtgagaatgctatcaataggatgaaactgcacagtgtcattacatctcagacgttttatgatcttctggtggagtctggtttgctgtgtgttgatcttgaaagacatgtgatacaactgttgttagaacttgcacttgaagttttggttccaccgtttttgacatcagaatctatggcctcagctgagatggcagaatgtgaaaaagcaagctttcttgtaaaaaccgcatctggccaatttaatcctgacaagcagaagatctataatgcaggtgctgtcagagtactgatccgttcactgttgctttgtactccaaaattgcagttggaatttctgaatcttctagaaaggcttgcacgtgccagcccattcaacaaggaaaccctcacgtcagctggtaagaactttgtcttagggttccacttgggctcgttattattggctaagttaactcttaaaatcacaccgttgctgtttattctcttcttcactcttaatgaattataatggagcaggttgcgtagaactcctgctagagattatctacccctttctgcagggttcgtctccatttctttctcatgctttaaaaattgttgaagttcttggagcgtacaggtagtcaaccatagctaaaatttttataatacgtagtcttaaggtgactaggtttgtttgtaggctgatcttactcaaaatacggtcttattctggtgcagattgtctccatccgagctcaaaatgctgtgtagatatgtcatgcagatgagggttatgaattcgggtccctcactaattggtatgatggaaaagctaattctcatggaagaagacacaggattggaatgtgtttccctggctccttttgtagaaatggacatgagcaaaactgggcatgcttctgttcaggtgtccctgggtgaaagatcttggcctcctgctgctggttattcatttgtttgctgggtccagtttcgtaactttttgacaacccaagaattagaatcagaagtttataaagctggtggttcgtcaaagacgcccattttgagtgggcagcaaagcgaacaaaatattttccggatattttctgttaatgctataagtaatggaagtccatcctatgcagaactttattttcaagaagatggtattctgacccttgccactagcaattcaaattctttgtcattttctggattagaaactgaggagggcaagtggcatcacctcgctgttgtccatagtaagccgaatgctcttgctggactctttcaggctagcgttgcttatgtttacattgatggaaaactaaggcacatgggtaaactggggtattctccttcacctgttggaaaatctttgcaagtaataattggaacttcagccacttgtgctagggttagcgatttgacatggaaaatacgctcatgttatctttttgaggaggggctcacgtcaggctgcattggtttcatgtacattcttggtagagggtatacaggtctttttcaggatgcatatctcttacgtttcgtacctaatcaggcttgtggtggggacagcatggctatccttgacttgttagacactgacatgtcgtctggtatccaaaaatttgaagacagtaatagacaaggcgattccaaggcacattgtagtgggattgtatgggatctcgataggttagggaatctttcaattcagttacctggtaagaaacttatttttgcatttgatggaacatgctcagagttcatgcgcgctaccggaagtttttcactcgtcaatcttgttgacccattgtccgctgctgcctctcttattgggggtatacaatgatcatatataatttcgttcgtgttttaccttttatgttttagtttcattctacgtttctcaattatataggaataccgcgtttcgggcgcctggtgggaaatgtgagtctctgcagacaaaatgtgattggcaatagtatccgcccagtgggaggaatggctgttgtacttgcactggttgaggctgccgaatctagagatatgctacatatggctctttcattgcttgcctgtgcgcttcatcagaattcccagaatgtgaaggatatggaaacatacacaggctatcacttactagctctgtttttacgtcccaagatggcgctatttgacatgcaatgtttggagatatttttccaaatatctgcatgtgaagctttcttttcagagccaaagaagttggagagtgggcaaactactattagcatgtcacctacggagattatacctgaaaacaactatgaggatcctactctgtgtaaatttcaatatgaaacttcttcagttggatctcatggggatatggatgatttttcggggcgaaaagattcttttagtcatttatctgagcttgaaatgggagataatcctgttgaaacttcaaactgcattgtcttatccaatgcagatatggtggaacatgtcctcctggactggactctctgggtgacagcccctgtttccatccaaatcgcctcacttggttttctagagaatctcatctcaatactctggtacaggagtcacaatcttgcaattctgcgtcaaatcaatctggtgaaacatttgttagtaacacttcaacgaggggatgtggaagttcttgtcctagaaaaattagttattcttcttagatgcatcttagaaaacgggttccttactcctgagcttgaagatgtggttaggtttgcgattatgacatttaatccacctgaaataaagtcacaaaactcatcaatgcgcgagtcaatggggaagcatgtaattgtgagaaatttggtattggaaatgcttattgatctccaggtaaccataaaagcagaagaactgctggagcagtggcataagacagtttcatcaaaattaataacgtacttccttgatggagctgtgcatcctagtagtatgagatggattatgacccttctcggtgtttgtctcacttcttccccaaatttttctcttaaattttttgccagtggaggttatcaggggctggtacgggtacttcaaagcttttatgattctccagacatatattacattttgttctgcttgattttcggaaaacctgtttatccaagactaccagaggtccgaatgttagactttcatgcactaatgcccgatgatggaagccatgtagagttgaattttgtagatctgttggattcagtggttgccatggctaaatctacttttgacagattgatcatgcaatcaatgcttgcccaccagtctggaaacctttcacaggtgagcgctagatgtgtagctgagcttgttgagggctatgcagatatgactggagagcttcaagggaaagctttaatgcataaaacatatgcggcacggttgatgggtggtgaagcatcagctcctgccactgctacatctgttatccgtttcatggttgatctagcaaagatgtgccctcaattttcagctgcttgcaaaaacacagaatttctccaaaagtgtgctgatctttacttttcttgtgtcaggtttgcatcacatgccttttgcatatatatacatttttcagtaccacatactgaacatagatatgtatatccttttctgtacattcagaattcatttttttctgtctgtatcccttttgtatagtcgcggcatagagacattggaaacagtatttttgttccactaatcatatattcctgcatgtcagaaggtcctagataagaccaggattttttttgttttttgtagttactgtgacctgcaagatgttttgcaaatattgaccaaaatctgggtcgttttgcagggcttttcatgctgttaagctggccaaacagctctcaatgaaagcagaagagcagaatataactggtggtgatgatagcagcgtagaagggaatttttgtagagtgtctcaccaggacatgtccacaaaaacctccataagtgctggaagcttccctcaagatcagactagcagtgtgatttctgtagacatgtatataccttcggattatgtggctgttgataaggtggagaactttcttacaacaccgccaggggaatcaaacaaatcatttcaaggtcgcgaatatattgcgaaacaagatggtgatcatgttggctctgtgtcagcctccagtgaaatgaaatctctagatcttacaggtagttcgagtcaagttcaaccaatagattctcggagttctgaatctttctcgatgttagaatctccccttttatctgaaaaatcaagtcttgaagttccattcattccatccccatccaaaagttctacaatttccactcctcatccgtcgcatatctcagttagtgaatttgatgcatcttcagatcaatcatcaggttcacaaggttcatctgctgtccatacattatttacaattagcccaaaagttctcctcgaaactgatgagtctgggtatggtggtgggccgtgttctgctggagcaagtgcagtgctagattttatggcagaggtctgtgctgacataatgactgagcagattaaagcagtacaggctttggaaagcattttagaaatgcttcctttatatgtggatcctgaatgtgttgtagtatttcaaggcttatgccttagcagagtcatgaactatcttgaaaggcgtttcttgcgtgatgacgaagaggatgacaaaaagctagacaaaagaaaatggtctgcaaacttggatgctttttgctggatgattgtggatcgtgtctatatgggcgcttttcctcaaccaactggagtccttagaacccttgagttcttgttatcaatcctgcaattggctaacaaagatggtagggttgaagaagtcacttcttcaggtaagggtttgttatccattggaagagcaaccaggcaactagatgcttatgtgcactcaatcctgaagaacacaaatagaacaatactatattgtttcctaccatcgttcttgataactattggagaggaggacctaccgtcacgtctgggcttgcttgttgaatctaccaagaagcaaacttcaaagttaagcggcaaggaatctggaattgatgtctcagcagttcttcaattgttggttgcaaacaagaatatcatattatgccctagcaatcttgatacagatttgaattgctgtctgtgtgtgaatttaatctctctacttcatgaccagagaaagaatgtgcaaaacatggcatctaatattatcaaatatttgctggttcaccgaaaatctgctttggaggatttgctcgtcaaaaaaccacaccgaggacaaaaatttgatgtactacacgggggttttgatagattgctgactggaaatcttccagaattctctaagtggcttgagagctccgagcaaattataactaaagtactggagcagggtgctgcagttatgtggatacagtacatagctggctcggcaaaatttcctgatgttagaatgaaaggcatggatggtcgtcgcactagagagatggggagaaaattgcgagatacgtctaagttagacctgaaacactgggagcaggtaaatgagcgaagatatgcacttgaagtagtacgtgatgcaatgtctgctgagcttagagttgtccggcaaaataaatatggtttgatacttcatgccgagagtgtgtggccaactcacctccaacagcttgtacatgagcgtggtatattcccaatgcgtatttcccatggagttgaagatcttaaatggcaactctgtcctattgaaggtccatatagaatgcgtaaaaagcttgaacgatgtaaactgaagattgatagcctccataatttactagaagggaagttggaacttggagaaattgagctactcaaatccaaaagtgaagatggtcttgttatttctgatatggattctgagccagctttcctgctaagtgaactttacagcgagtccttttccgaagaggctgatgatcttaaggatgttccatctgctagaaatggatggaataatgatagagcaactagtacaaatgcggcgagtcttcataattctctttcttttggtggcaagtctagtagtacagcagtatctgttccaataagcgttaacacagatgaaaaatctgagactggatctccaataaagtcatcttctggtaaaatggacgaaatcaaacatgtggaggaagaatcagagaaggaattgaaagatgatggtgagtatctgatcagaccttatctggaacatcttgaaaagattaggttccgatataactgtgagagagttgttggtttggacaaacatgatgggatcttcttaataggggaactttgcctatatgtgatagagaacttttacattgatgatcatgggtgtatctgtgagaaggaatgtgaagacgagctatccattattgatcaggcacaaggtttgaaaaaacaatttcatggaagcctggaatccaagtccaagtctagcacattgtggagtacaacaataaaaatcggtgctgtagggggaagagcatgggcatatggtggtggagcttggggaaaggaaaaagtgcgtgtgactggtaacttgccacatccttggcatatgtggaagctggatagtgttcatgagattctaaaacgtgattacgagctgcgtcgagttgctgttgagatatttagcatggatggatgtaatgatctccttgtgttccacaagaaagaaagggaagaagtcttcaggaatctccttgccatgaatcttccaaggaacagcatgtatggcatcttgttgcttttcatatcaattttttttggcgctctcagcatattcccctttttccccatttttctctagtcatgaataaacatgtcacgttaagctcaagagctgagcattatatagctcagtcttccatgaggcccttcctaaatctatgaatctgttgtttattctgtttgtttttcttttcaggctcgatacaaccatatcaggatcagcgaaacaggaaagcaaagagggtagccgtcttttcaaattgatggcaaagtcattcacgaaaagatggcaaaatggggagatcagcaatttccaatacctaatgcatctcaacacccttgcaggacgtggatacagtgatctcacacagtatccggtatttccgtggattctagcagattatgatggcgagagtcttgatttgtcggatccaaataattttcgcaagcttgacaaaccaatgggttgccagacgcctgaaggagaagaagaatttaggaaacggtttgtgatatgcccttaaacttgatttagagcttttcttgtgtgttcctcaccatacagctttcccttttaattagttatgctttcatcgtgtcgtaatcatattccaagaagtgtttctcatgctttccttctccctttatcatttcagatatgagagctgggatgatccagaggttccacaatttcattacggttctcactattcaagtgctggcattgttttgttttaccttattcgccttccaccgttcagtgctgaaaatcagaagctgcagggtggtcaatttgatcatgctgatcgacttttcaatagtattagagagacttggcttagtgcagctggaaaaggaaatacatcagatgtgaaagaactaattcctgaatttttctacatgcctgaattcttagaaaacagatttaaccttgatttgggtgaaaagcagtcaggggataaggtagcaagttgttctaatggtgcttatgttccttttacttcgctgtttccctttcatgagaaagttccttgtataatgtcaggttggtgatgtaattttacctccttgggctagagggagtgttcgtgaattcatccgcaagcacagagaagctttggagtctgattatgtttcagagaatctgcatcattggatagatctcatctttgggcacaagcagagaggaaaggtacattacatgttctccttttggtagtcaatagaaaaatctaactatcatgtcttagagatgttgcttcttaaaatatcgaatcatgaggctgtttattttcaggctgcagaaaatgctgttaatgttttctaccattacacgtatgaggggaatgtggatgtagatgctgttacggatcctgccatgaaagcatccatactagcacagatcaatcattttggacaaacgccgaagcaactattccagaaacctcatgttaaaagaaggacagacagaaaagtccctccgcaccctctgaaacactcgatgcatcttgttcctcgcaatatacgtaaatgctcatcatctataaaccaaatcatcactttcaatgataagttgcttcttaccggcgctaactgtctcctgaaacccagaggctataagaaatacataagatggggtttcccagacaggaccttgagatttatgagctatgatcaggacaagctcttatccacccatgaaaatctccatgaaggcaaccagatccagtgcgctggtgttagtcatgacgggcgcattgtggtcactggagcagaagatggtctagtctctgtgtggagagtcagcaaggatggcccccgtggttcacgacgtttacggttagagaaatccctgtgtgcacacacagccaaggtcatttgtctacgtgtaagtcaaccttacatgatgattgcaagcagttcagatgactgtacagttatcatatgggatctcagttctttaagttttgtgaggcagcttccgaatttttcggttcccgttacagtagtctacataaacgaccttacaggagaaatcgtaactgctgctggaagtgtacttgctgtttggagcatcaatggcgattgcctttctgtggttaacacatcacagttgccaactgatttgatagtatcagtagcaggttcaacgttttctgactggctggaaacaacctggtacgtgactggtcatcaaagtggggcacttaaagtgtggcggatggtacattgtactgatccggtaagtgtcccgagcaaaacacctagcaacagaacaggaggtctaaatttggggaatcagaagccagaatacaaattgcttttacacaaggagttgaagttccataagcaaccggtcacatctctgcatctcacgaccgacctaaagcaattactgagcggcgattcagctggacatttgctttcatggacagtaccagatgagatattaaaagcttcactcaaaaaagcttcatagtttagaatcaaaagcatcatctaaaactaggactagtatctagagcaatcactgatggtcaggagacttgaggacaaatcactgaagcacctaggaggtagatcaaagtcaaaatgtaagacctcatggcaaagactttcctttgttgagtctcttacctcgcatctgattctttttcatctgatttgcagattaaatgttgttaccgaatgcagaaacaacaaagcgagacagaatcccgtcgatttgacaataactaaaaggtttgtctatagaatgtgtaaatagagttaacagggaattgtgtgtataatagattattctgcaaataataacctgagcaaatttaatattagagccccatatatatttttctcagatgaaattatgttattagtagcttagggagttttaatttgcttcaacatcaatggtaatgtcttatgttaataacctgtagcccactctaaagtacataaccgttatgttgttgctttgtttcttatgaagacaaatattagaaagtacacaaatttggggatagtattacattttctaaatattgggaacaatttagagtctgaaagtagaagaaaacattgaataaagcgggggtgtcacggaacatatcaatgaaaaaatgtaaagaagtgttttaagttttcaaagtgaatcacggaacatatcaatgaaaagcacaagatacattagacaggagcttcgaacctcccaaccatttctccagaacatactccttcactttcttctcatcatttccaaacacattacacatagccttaacatagttagatggaaattttccggttatcctcacatagaacatgacggcacgagccatgtctttgcacaaattgtccctcagagattcaaacattgacgtcttggccgtttcgagtgaagaagatcttggtggttgcgacctgttgatatttcttcgtatgcaagcttcttgggggtttaagggagcagcagagatagcgaggaaggtcacaaagaagactacggcgacgatgctcatggaagtcttcattgcttttggcttcgcttgttgtttctgtgaagaaagaaagcgtatagacatttatatacagtgagtaatgagatatttgaaacttgtttcgcattaaaagaaagttcagttttatatgttaaagtgaaaattgggggtttcaacattcaaatgtttcatgagtttcacttactagggagtatcagtttggtttataatgataataataatatcataggtgttgttcacaaatagtgaccagaagagtttacaatgttagagggacaacaaaaaagaagctaacacctttctttcaagctcttcattaatggtgattgtttatttatataatatcaatagcgaggcgtgtaagagtaaggtcccatggagtatggaagctgataatattgttgttgttggttttgtccgaaattcatgtgaccttgtcttccacttctgttgtattgatcccacattatttgttcttccattaacaatctttgttttttctccatatcattcatttgcacgtatgctggtggggctacctctagcgacgccgcgaatggatccaccatcaccggactatttctgtttccattggctgtcggtggcggcgctggcaatgccaacatcgaggctgcatcatcatttagatcagattcattgaactgactctcatgaaactaagataaaaattgaaaaatgatttcattttaaatttgttttacctgctgggcttcctgcagaaccaaaagccacactactagcacttccactacttccataagccgtagacgttttaaccgcagcattaaccgcaccgtactgatacattccatcaagcaacaaagtatcaaatcctcctccgagctcactcttttgtcccgacaatcttgtcgccgatctcaccaagtccgtctcccaatccgccgaattatcgttaaacgcttcccaccccggtccagacgcactctcggtcccaacgacaccatcaaataacgctaacgccaaactatcaccaaccgttcctgccgttacacccgcttcatctgttaaatccagcaaatcaccctcttgatcttgtcttgaaaccacttcttcaacatctttctttgtttccattttctcttcttcttcctcttcttctttctgttccggtgcgggtaatgctttgatggagtttaaatcttcttgattttcttgaatatactctgttttgctctcctcctcctcagatttgttagacctttttgatgatgattttgttgtttgtgcagctaaagctgatttatctcttataaactcatccatgagatcaagtttcttctgtgtaatcttttccaattctggatactctgaagatcttgcaactgccatgttcttacaccatccgtaaaacggatctaactcgtcaaactgtttagaaactcgacagaagatttcatagactttgatggaatcatgaatgtctaattccatgaatcgctctattaatactcccatgatctctgttatattgtagtataactgaaaactctcttttactatcggatacatagccacaatcaccactctgttgttcttcgcattacctgttgcaaaagacctaacttattaaccaagaaatccgaaagtggaaaagcgtgtgttccaaggaaattaattattacctgttggacgacaagccaagaaccgatcaagaagctgttgtaaatgttgtactctgttgaagattttctctgttttcatctctgcgactggtttagatttaaccacaatagctttcgaccgaatatcgttgcttgtccctcgatgatcatcttcctcgccggaatcaccatcaccgccaccaccaccaccacttttttttttccctcgtcttccttgcatccggtaatcaagacgttcatccaaatacaaagcataagtccgaacaaaagcagagtaatcccacgaatcagactgactcgcatctctgaaatcagacatgttaagcaatctcgttcctcgtctcgtcgcgaagaagatctcttgctcgtaggctctatctccatctgttagcaaccgttggatcaaaatcaaggttttgagagcaaccgaccagttcttggtcttgttgagccgtcgcgagagagttgccacacaagcgcttacgtaattgcgtgagtaagaagttaggcataaaatctctctaatgtacttgtcctccgctggatagtcatcatgtcgcgtcgctttcacgacagctatttcgagttccgttaaagaactgcttcgaccaccgactttggctaatcctacgcttgtttgatctttcacggctcctatggcacgttttagcttacttgaacccattttgacttacgtacgccgttaaacagaggaagagagaggagaaaaaaattggaagaacgacgacttttttctttcacttgtttgtcgtcgtctctttttctcctctgttttttttttttgtgttttctgacgagaaaatgtgaatgcttgatcgatctaccatggaaatcgccgaggttgtcggaatttaatgataggggaaattagtaaagccatgtgagctatcttttttaaaattggataaaaacagatatacactctgttattagctataaatagaaagacgattctcaaataagaatcttgtaatgttataagacagagcttatatatatatataagccatgagactgtattttcacaagatgttttctcatgattcgtaacttaataacacttacaaattacagatgcatagacattaatatagtgcgaaacccgcttcttgtttgatcagtccacgcattttttcggcctgtaaaatgagcaaaaaaaggggagacaggaatctgatatgtataaacagggatcatagtacttcaaatggttttaaattgttcaatggtcttaaaagaaagagccatgttttagcttaccatgctgaatcgttctgaggttcggtattccagccatacgggttggcgcttggagtaacatggtgattttgcccatttctaattctctgcaagggagagctggtttgggatggaggagcagcgaaattgtttccgagtcttggaggtagaatggttgggatcccgatgttttggtttgacatatggtttaggtttgagtgtggttgataagctggaataatgctagaagaatccatcctgttgttaccagttattggcattctgttgttgttgttatgtccacttgatcttccgagaagcatcggattcattcctgttactctcttcacggtttcttccgccattttcaccttaacataacatgggagttactaaaactgtatacaaaaaaagggtagttcagaaaaaggagaggaggataatacttaagtcttcttaccttagctcttaatgtctcaatgtcagcctttagtattctattgccaacagcagcctcgtcatacttgtgattcatgttgctcagttgtttaagaagtgatgaatgctcaccttttagatcattaacctatcaaaatacaaattaggtctcattaatatccttcaacacaaaaatgaggtgttgagaggatacaacacaaaacctgtgtttcgaggtcacttgtttgctcctgctttctccttctagatcgcctagctgactcacgatttgacagcatcctacaaatattaaaaggaagaacaaggctctataaatgtaatcttcaaacgacaagaaattggagaaaaagtaatgattaccttctagattttttaacgtcctctggcttcaaggaaccggtggtttcattctcttcatcaaggtcctcgtcatcagaatattctctcgacgatccactagtaacctgcttcattgatacaccagtttttttcacctcagctggtaaggaagaagtaacaccaagttctcctggggtcatcaaagaacctaccacgattaaaacttactatgtctaagactcagaagagatatctgaaagagaaagacgagcgctgaaataatgatttcccatatattgaactaaccaccagaactcatctcaatcccaagcttattgttcttccagaaagcagtttaatttcaatgagaaagtcagtcacaaaaagattgaaacttgacggataaaactaggcgcttgatccaacaaaagtaccattttctatttctaattccttaacctaggcatctaaattaacaaacacagaacagagaaacgaatctgcaggtttatcatcgctcatctatcctggtgaaactaagaagagactcttaccttgagtaagaggactggattgaactggttgaagttgagtttctggagaactagtcgaatcttcaggcttcacagacccaacctaagaagagaacatcagagcttcagatttagatcaaaacgcacaaattacacatatagataagaaaaatagaagattaacaacacacccgaagagaaacaacagtagcgcactcagtctcaagcttgttcttaagaacacgacgataatcatcggaatcaacaatcaccgtcttcgtcgtcatgggagcagcacaatccaaatttcccgaatcgcgatcacgaaatcgactatcatcctcgaaatcattctgtccggaaacagaaggaagagattgcgccgaagaaacaccgacgatcgcgttgttgttgttaccaagtggctcagagctcaccgccgacgaagaaatctcttcgagaaacatctcgaaagtccattccggttgactctggctaacttcatccgccgtaacaggcttagaagagtcgggattgagaggaatcggaggagtttcccagaaaggatcggagaaatcgtcaatggagaagatactgttcatcgctcgctctctttttcactttctgattcttctttttttgtcggtactttgcctatttgcatttaggtccacccacacaagtatattctctttttttattacgtacaataaaataaacattttttcttacacatttctgttttatttctttacaatattctttgaatagtttttataatttaaatatctattgtataacgtccactaatgtttacatgaaaaaacgtaacagtttttgcaaacattgttatttaattattcttcaaagtttgatttattcaatgaacaacgaagttgacataaaacattagattatattttaatttataaaaaaatactatattatactggtcattaaaaatttataaaatgtcaccagaagctaaacaaataaatcactaagctatattacaaatttacaatagacaagcctaaattataaaaaaaaaatatatggagttttttaaaaatctaaatttaccacaaaaagcttctaaaaataattaacgaactagatcattttttcgcgccatatgtaaatttaaacagtcattttcaattttcatatatatggaatttactctctatttctttttgaccttaacatagtgtcaccaataccacaaatcaccactatgtaggctatattacaatagagaacgaaccaaaagaatacaaaaaaacaaaccatatatatatttttcaagcaatccccagttttaattattgcaaaattacaagaatctacacacattttttttttttttgtgaaagggctaagaatctacacacataaatatacacacacaagaaaaaacttctaaaaatagtaatacaaaattataatgccaaagcttctttcttttttactagttctgcttattctccaaagctaattggtcattgttgatcagaacagaattaccactctcatcctctgattcattcacatttgtcttcctccgcggtgaccttccctgttctattcctcctcctcctcctccagagtttctccgatcatctttagagaccaagtcctcagcttcaagcatatgaatgatatgacccatttttggcctcttttgagcattaggatcaacacatcttaaagctaccaaaagggtacgcttcaatgaccttaacgacggtttatcaaccatcctcggatccaaaactccttccgcatctcgattcgtcaccaatctcttcaaccattccacaagattcacttctcccggagcccggctataatccacaggacttctccctgaaataatctccataacaagaacaccgaagctataaacatcgctcctctcattcaacattccggtactcgcgtattcaggagccacatacccaaacgtacccatcacacgagtagtcacatagctcatctccgaacccaagagcttagctaacccaaagtcagaaactttcgagttccattgcttgtcaagcaagatattactcgatttaatatctcggtgaacaactttaggctcaagaccttcgtgtaaatacattaaccctttggctgttccaagaacaatgttcatcctaatctcccaagtaagaggactcttaaaccccaaaccaccaccatgaatccattgttctaaattcccattatcaacatactcgtaaactaacatcctatgagctccttcaacgcaataaccaagcaatctcaccagattcttgtgtcttacgcgtccaatagcttcgacttcgactttaaattctttctcagcttgtcctctgttgttgagcagattctttatagccaccattgatttatcctcaagaacacctctatacacaatcccataacctccttgtccaatcacattctcgtcagcaaatccattagtagaaacctcaagctctctcaacgtataccaatgtccccaacctaaatgagaaacctcaggacccgacaacataagtaaaccctgatcacccgacccggacccagacccggaaccagtccaacctcctcgttccgggtacgcaatccgatgatctttaccaatttcgatgtgaattttgttatcgtcttctctttgttggttttggtgtggctccggtgttgggtcgggttgaattggaggtcgaatctcttgaatctccttggaaacaacgggaacaatcgtatggttagatttagaagaagactcaagagatttgttcttgttgcttcgtcggtaaatgaaccagagagagatgagaacgagtaaaagaacgatcgcggctccaacgcaaacgccgagaacaacccataaacgtaaaccaaaaatggaagtgtgtctcgagagctgattgttgactgagtgagaatccgccattgcagctcactgactcttcttcttcttcttcttcctctgactctctctttttgcttttgttctgcttcacatataataatcatcacaggaggtttttctgaagtagagacaagaaaagagatgtcgaaaagacaaacgtaccctcgaagaggcaagctggctttgatgggacttgcactcatcattatttttagtatatatttacacttttgccacttttactgttaatgagcaattattaaaggagggtagtatcgttattaaaggtatagtcaggggtaatattgtcaattgaatcgtgttctgaacaagttttttttttgcgcgtggtctttggttgtgatttacacaaatctatctatcaaatcaaatcgaagaaggagagaagaacagagaaaaagaggtaatgagtaaaatctatgagcttttgctttatcttcgaatctaagatcaggaattgatcagggtttttacccaatttcgataattgtcttcttcgctggattgatttttgttctggaattgtttatcgtgtgtagttgaatcaaatatggctgggagagctacgatccctgctcgcaactctgccctcatcgcaatgatcgccgatgaggtaaattcgttaccaaaaaactcatctttttatatgttgatgaaggatttgaggttccattagtttgattctttagataattttgatttttcatttggatcttctgtgttgagttttgaatctctgagatgtgatctgaactaaatcaatgcgttgtttgtatagatttatttatccgtaaactgcttgactttttggatttgtttgtggaatttttaatctttttggtagtgattcaagccttagaatagctttgtccgtagttctgtgtatttcttgatttgggatcagaccaaatctgcagatgatctgatctgctattactgaattttgatttcagcacgaatcaggaaactaaggagtagaaatcttcctagaaactgtattaacattgaataacaagaggtttaggttttttaatgttagtcttcacaactgttctggcttaacaattggatttactccattgtattctatcagaaaatcatgtctagtctcttattttagacttaacttgcattttcttccttgtacaacgacttgttactggcagacacttaattggccaatggtggcagaattgtttggaactatccgttgatataaccctttagcaatcttcaatgccacttacaagacttaaattttgtgtacaggacactgttgttggatttttgatggctggagttggtaatgttgacataaggaggaagacaaattacctcatcgtggattcaagtatgtttttctaactcaatatgatcttgaggaaagataatcttttcaatcatgaatcaagttatgtcacttatctcaaagtggtatccttttgacaaaatcaagttagttgaagtttttcatctaatcaatttcgtgtggaattgttaggagataactttcttaacttctatttctgtagaatttgtataaattacccatctagtcttctaagttaattgatttttcttttcttttggttttgtcttttcagagacaactgtgagacaaattgaggatgctttcaaggaattctcagcaagggatgatatcgctatcattcttttaagccaatatgtaagtgtcttcttccaaatccagtttacttgtaatgttactcatcttaactgctatgtctgtactgtcttgtttaagtcgtaatcaaaggattcatgacttgtactcctccactttattgagccccttatgtttaatgccattattgactatcttacttgcttccacgcacccttttcatcatggatcaaagtcaccattatgtagggtagttttgctatctttttcccagcaattagtatattattggatccaactgtgtcagaaacataaggttaggctactttgtatcagccttttgacacatatcatttgtaaacatgaaatagaatgaggcctatctctatgtgctctatactgcaaagtctgtttctttctacaatgtcaaaaatgtaatgagaaagtttcatgcttgtagatcgccaatatgatccggttcttggtggatagctacaacaagccagttcctgcaatcttggagatcccttccaaggaccatccctatgatcctgctcatgattcagttctctctcgtgtcaagtacctcttttctgcagaatctgtgtcacagcgttaaacatatgcattttgcaagctctcggagcctatatcatttgtttgtttttgatattcttgtctttctccttcggaacccgaaaaatctacaataatgtataactcttgatttttatttggagaggaatgttatattatgaagaagcaatggtagcttcatctggttctttgcattcaattaagaaagaatcattgtgggtattcaagagacaagagcagacttcaaagatttagtgaagaattctagctccttaagtccttgctcaggtgattcagactcgcccaagatcttaaccatcgcgctaccaacaatgactccgtctgctccccattcagctacctgtgatgtgaaataaactgagtcgggttaacaaatccaattgccaagatattgctaatccagtgtctgtgatgcagcccaacctgtttcacatgctcaggttttgatatgccaaatccaactgccactggcttgctagttgcctctttgatttgttgtagaagagattgaactttttcgttaacagactctcttgtaccagtaacccctactgaacttacctgaaaagagctcgataacaacattgcggctatataagaacacgaacttacacgcatcatttactgaactagaagagtcgtgaaactgtgattcttacgagatagataaatccttcagaggcttcaacaatggcattcattcgttcttttggagttgtgggtgttgtgagcagtaccttgaggacaacatagtaaagatggtaaaggaaagaaaacagtttgctgtgaaagatgctatcttttattgacagctagagaagaatgtcatactagctcaatttgatgcttccgagcttcgttccgcagagtttcagtctcctcgagtggaacatcaggaaccagaagccctatgaagagacacaatgttaacgtagtaaagacaggaactaagaataaatggaagcaaatgacgtcaaaactgagccctgaaacagcatataagtattttacttgggagaaaaattgaaaatgtcaatgtaccatgaactccagcattctttataacagtcatgtagttctctactcctcgtcgcaggattggattgtaatatgtaaacaatgcaattggacaagataactgaggaataacctgaagaaattttggaataaaaagtgtccctttgtaagaaaaccaaaacaaaaaaaaatccactatctactcaacaatgagagttgtaatttcatcatatgtaatctaaacaactaagagaggctgtaagtaaacaaaacaaaccacacacacctctttaagcatagagataatggagttaaagttggttcctttaagtaacgaacgtctcgcagcagcctatgacaagaaagagagaaagttcaatattcagaagatgattgaaatgtgcagcttttgaggatcgaacctggattgctggaccatcagctaatggatcagagtatggaacaccgagttcgattatgtcggagccacacgaatcaagcactttaagagctttcgctgttgtagaaagatcaggatcaccagctgtgatatatggaatcagagccacctacaaaattgttttcaacaacaatcaagaacaaatcgaatagagaaaggaaataaaaattgaaactttagggtgattgaagagagaatttacttactttgccttgtgactttaacctagcgaatgtttctgatagaccaaccgtggaggaaggagtcttgagaagatccattgcaagcgttcgaagaagagactagcgcgagtgactagtgtggctttaactctcgtacaaaagtaaaaagcagagagataaaaggaatattaatttggagccggtttaatcatccaaaccaaagtaaaattaaccggtttaacctaaatcatatttgattgcttactgtacaacaaatccaaagtcttgaaatttaaatgtactttttccaacacattgtaagaaaccaaattccaactgaagaatatttttggtttttcgttggtttcaaatttcattacccaaaaccaaaataattgaacagaaacatatccatgggcatccacaatgttccaaataatacaatatacaaacagattcaatttcccaattctaatccaaagatggtaactttgtaacaaaacaaaaaaatcaagtcactataacttatgtataaaccacaaaaccggaccttgaagctaaaatctgatgatgatcctctaaatggaaaagataatatctctgctcagttgttatgatcaggtgtaatctcattgtttgtgtcccctgcgttgtttcttgttactctgctgagctgaattcctgcaaaacctgcaccaggaccagcagcaggagcagaaccagaaccagaatcaggaccaggaccagcctgagagcttccttcgtctccattactagctgcagcttttaggtctctcttttgtttcactttctgtgcccaaccaacaagaccaacctgcacattctcctcgaatatagctttcttgaagctacttcccatctgttgtaatataagaaaagggtcaacttttcagaaagaatccaaaaaaccaaaccaaaagattctcaagctttttagtaaaaattagcttgttacctgtgagacgatggcgtaaagaggcagtgtactgtaactgcaaagcacttgaatgaagaccctaaagagaagaagaaagataccagtctacaatgagttatactcaacgaaacaatatgagaaagaacaaaagaaaaaatgtcgaatctttatgcttacccgataaccaatcttggaacaatgtatctcacctgtcccataatgcacgagtcgaagccgtatgtaacctaaaataaagtcatcagtcttaaccattttaggtgaatcttaaaattttgttttttcttttcttaaagaaccagacttacccaaatccaaaagaaaaacgcaatctcaaaagcattctggaagaggataaaatggatcaagtagagaacaatttgaggtttgctgaaccagaaatgctcatctgagggtttcaccactaagtctccttcaatggctacatgtttctctgcaacttcatgagctaactgtgcaatcacatgctccaactttgttcccacagcaagaagcaacttcaaattttacattaaaaaaaacaaattcagctcaactgaaagaagatttaagcacattccaacgaagtaaaatgaggacaaaaacaaatgactcacagcaaagggaataaatgctatccagaaatatgtgtgccatcctgcaagatacataattgtagcttcgatatcaaaggaaacgtaataacaatttcttttcatttctattgaaactagacataagaaaaagatttgagttttgtgaaaagcataccgttaacatttagcagcaaaaagatgacgacaaagatccaaagataccaactaataccaacaacttgtttgaaatcatcctctagagcgcgcatcatatacttgtggaaattaagcttggggtttcccttacaatgtgtctgtatttaaaccatatagattgttagactaaaagatcaaagcaaatgttcttgattaccaaatctcaatttttgtaagtaatcaagattttaccataatgaaaccaagacgtaaagtcacgtaatctgatttcgtcacagaatcatagaattgcttgagaaaggattgctgtcatgcaaacaacatactctcaacatcgggtagttccaaaggacaaataaccaatataaaactagtaatgtaatttaaagataccataccgtccatccgaggatgactgaatctttgccaataccaagaaaatgctctttaataaaagcatggttgtgtacatgagtgacccttcttttcctgagagctgcaacaaagcacaataaataatcaaacaatatgcataatgttccgctagcatataatcgatttagtacctgtttcggggtcaaacttctcatctgcgatcgaatcctcccatttcttccattggtgaatctgcattaacatagataaaccagaggtttcacacctgagaacttaatttatatatacattgaatgtagaaaatttctatattggtttgtgctcacccttgtgcttccaaaaatcacggtaaggacacagaatgtcacatgggatatggcgaggacgaagatgaaaatatgtagatggtgcaatgcctcaagcgaaagcaatggtactttaccctgaaaacaagagggagagaagtaagtactgattcaatcaagtaatagcaagagcaacacctaatatgactatagtgaggccctgaaggtatttgaatttaccttttcgctacagtaaccaacttgcacagcagcatgttcagcaagtagacgcctagtggttccaacaataggtaaaaaagtctgaaaatgttcttttgctgtaacgtttttatgttcacttgccccagcttctcgtcttgaatcgagagaacatggaagcatatgcataagcacattttctttcacacagaatttggaaatgagcccttggaataccgtcagtaacagcgatataaaccctaacaacatcagctctgcaattcaccaaaatgattcatcatacatccacaaatttgcactaaagcaacacaaagaaaaaaaaaaagtgaaagatttgaactttaaatactcaaagcgctgcttataatcagacacagtcacatctcacttaagctttaaagaaacaattggtccactattaacaacaacatcaactctgcaaatccttaaagatttgtcatagatcaataaattcgaaccaaagcaacaccaaaaggagtaaagagttaaactttaaagactcaagctacttaaaatctgacatagctacatttgattgaaggatttatcgaacaatttgcagattttgtaaactagaaaccataattaaaagactaaaacactgtgttataacccagaaaaacaaaactaatctcactcaaaagatccgtggaacccactcaaacaaaaagaaaagaagggcttttgatgttttgttttacgttggtgtgtgtgtgtgtgtacggtaccttctttaaccttttgaagggcttcgtaaaggggtttttgcttcttcttcttaagaacagtaccgaaatagtgaagcaaacgctccaccgccagtgaaatcgcgacgatgaccgtacaaactccggcgacgacccacgtcggagtgaattcaagcgacatcccttctcctccgtgacccattttacttctcacaccagagagaatttagtcaataagtaaagatgaatctgggaacaaaaaacagacaaaggaagagtcttttatgtaccaacactggaatgtcgggtccaggaagagaagaagatgaagaaatcagtgagacagattcttctgagtttttttatttatttattttcctctttgtgttgatgatttgttgtcattgtcaataatactaattgcttttgattagattaattatggtaaatgatctctattatcttcatgtaatttgattacgaccttattatagagtttatatattccacttttttttagtattaaaaatctgtgagacaaattaggaaacgcgttttcaactttccagtttccatattattcgtttctattccgtgtttacttaaagcatccacacacaatcacacattgttaatgagttaaatctataatcaaatcacattttccctctttttcctttctatcaactatgttccagttcacatgtttcgttgtatataattaagtgatactaggagatcatgtaagattgtgaaaaaataaaaaataaaaaaaatgagatcatgtaagaaagataaaaatacagaaacttcagagttccactgattagagcggtcgctgtcgactcatcttttattgaagaattgtaccgttctccggtgtgaataatattttatactggattggataatgctcgaacaatgtaaacttgatgatgctcgaacaatcaaaaggctacaaaggaagtatttttttttttttttagaatagatcggtttatctcgtttggttcggttgaacttaatttggttttagtttgtatttgtgtctttaaaattgatacggttagaacgaatgtatatgtgttgtattctttataaattaataaaatgtatttataaatagaataagatttatcatttttatcttattatataaagtttggtttttaaaatgaccggaacatgtgtcaattaaaatattagatttatacaagtaaaaaataatatctgtttatatatattacatgtcaaatctaaattaaacaatatatttaaaacaaaactagaaaattgttaacattatcaaaaaatgaaaattatcaaaagacaaaattatacacaagtaaaaataatatttgtttgtatattaaaataagggagatttataaaattacactttttttactactcttttgcaacaatacccttttatgttgtccatttttaaaaataccccttctcttgaacaaaatgaccaaattaccctcatctaatagaaacatgtaattgaaaactgaacttttcccgccaattttttggcgccaaattttttttttcccgccaaaaagaaaagtttctgccaaacttttttcccgacaaaaaaaaacattcccggcaaaaatttttttcgtaacaaatttttcctcagccaaaaaaatgattttaaaaatccttgtaaatattttttggcggcaaatagatttacaaagaattttaaaagggttttaaaagatttacaagagattttaaaaaggttttaaaagatttacaaaagattttaaaagagtttgaaaagatttacaatggattttaaaagggttttaaaaaatttacaagtaattttaaaaggttttaaaatcccttgtaaatctttcaaaatacttttaaactctttaaaaatctttacaaatcctttgtaaatcttttaaagccctttaaaatccattgtaaatattgtaaaacccttttaaaatcccttgtaaatattttaaaattttttaaaacaattttaaagcctttaaaaatctttaaaagacttttgtaaatttttgaaatccctttaaaatctattgtaaattacccttttaaaatcccttgtaaatcttataaaacccctataaaatcccttgtaaatcttttaaaactcttttaaaatcccttgtaaatctatttcccgccaaaaaaaaaaaattggcgggaaaaatatgtttgaaaacaaattttggcgggaaatttattttggaatatttttggcgaaaaaatattaatttttcattttgttaacctaaaacaatttccaaataagggtaaaatggtcattaaaaatttaaagagggtagaaataaaattggataaaacaaaagggtaaagttgaaaaagggcatcatgaaaagggcattagaaaaaaaaattcttaaagggataataattaatatattaaactattaagttgattaactgattttttttgtgttaatatattatcaaaacaaaacttgtttttttttttttttttttttcatccaaaacaaaacttgttttatttattgatttttgtaaataactgtttttcttagcttttattacttcttatgttggatgttcgtgtttggtctgagaattacctccttaagcacaagttgttcctttataaatgagctccatttaggcataatgatgtgaaccctttagtttttgttggtgtagactcaaattagagagaggagtcgctgagattgataagctagcaaacagaatcttccatatcgacaagcttgggaatcaacctgaattgtgatagaagagagaaaacattttctaggaaactaaattgtctcttttgaatttgaaatactttatttggagcttgtttgcttagcgcatatctcgaatttgattatatctcgcaagataattatgtgacgtttttgaattatgtaaacatctcaataagtgatataggaaaatttaacttacaaacagaaaaataagcgattttttcaatacattctaatagttgaatacattaattagaattaggagggatacaataatagataactacaattcattcgtcatgttctaaaaatagagagcaataagtacgacggacagtaccgtcactacttggcgtcatggtagataggtagtggatctgctagatatatgagaacggaaagaaccagaagctattagaggcgggaggagatatgtggggatgatttcagtgcaattccacgacgcaccatttccactttcgtaacacctaaacgaccgcttcggccgtataaaatcgcaaatgtttggtctcagtgtatttttccaatttccaaatacatcaattcaaattatataatatctagtggcaattataagtatatcatatattttcaaaattaattaaaaagattactaaattatgtttgactacaactattataatagttaaaaacataaacaaaaacaaagaaactattttaataaaaaaatcaagtaaacattaaaacataagcaaaaaataatgttaaagaaattattaattattaatttactaataattaatacctctataaattaattgttagaggtttaacgtaatttataaggaaaactaaagaagactttaacccataaagaaaaaaacaaagactgaattgaaggcccatatttagaagaagagaaagaagacccaaatatgatataaaatccagcccatttatatatttttattttgtttctggaaggaaaataagaaaatggcaaaaacgaaataatctgaaaaagtaaggtcttttaccaaaaaggatattttttttataaacagagcataaagttttcacttttcttctgctcctttctcgtctctgtcttcttcgtcctcattcgttttaaagcatcaaaatttcatcaacccaaaatagattaaaaaaatctgtagctttcgcatgtaaatctctctttgaaggttcctaactcgttaatcgtaactcacagtgactcgttcgagtcaaagtctctgtctttagctcaaaccatggctagtaacaaccctcacgacaacctttctgaccaaactccttctgatgatttcttcgagcaaatcctcggccttcctaacttctcagcctcttctgccgccggtttatctggagttgacggaggattaggtggtggagcaccgcctatgatgctgcagttgggttccggagaagaaggaagtcacatgggtggcttaggaggaagtggaccaactgggtttcacaatcagatgtttcctttggggttaagtcttgatcaagggaaaggacctgggtttcttagacctgaaggaggacatggaagtgggaaaagattctcagatgatgttgttgataatcgatgttcttctatgaaacctgtaagttctgttcttgctttggtgtttgattattagaaatgggaagaaatcgaatttgagggttttgaagagaacatttttggtaacttttgttttagtttttgatttgtggtaagtaactttaacaaagttgatgatttgcgttatgtgctttattttggctcagacttgttgaatctaatcgattttggtttgtttagtaaactaaggttagctcttgttactctatgagcaacttctcactagttcatgtagctgcgtggcttatcttgccttctaagttggtcaaatgagtaatcttaagggtctaacttaaattattctcttacaactaatggagtcaaatccttgtgcaaatggtttattttcgtttggtcttatttcttctgtgtgttgtctggaaggttttccacgggcagcctatgcaacagccacctccatcggccccacatcagcctacttcaatccgtcccagggttcgagctaggcgtggtcaggctactgatccacatagcatcgctgagcgggtatatttcagattctcttttgtatttccctgtgatatactatgttggtggcgagttggttgtagttgaaaatatgtttcggatataaaaaaatgttaacattgtgtaatgatctcttgattttatggagggattacctaaaagtttgttttactttaccacagctacgtagagaaagaatagcagaacggatcagggcgctgcaggaacttgtacctactgtgaacaaggtctgtacctttcaccctaaccctcacctgtatataatttctctagaaagtttgacactttctgtttctcccgtcttcgtgtgcagaccgatagagctgctatgatcgatgagattgtcgattatgtaaagtttctcaggctccaagtcaaggtatattcttctctcttctgcagttttaaactcgaactctctttcttgtgaattatcttattactccctatgcaatatgtttaatctgtttgttcataagattagagatctaaagatcatgtctttcaaattctctggatggatttttggtgttaattctggtcccaccattacctacccttcaaccaaatttcaatctgattagatcagttatttaatgtgggaaagaataaacaagtccaaaatgcttttgttttctttggcatttagtctcttttcactttttgttttgtcatagggagcctaatcacagtttatgattataataccatattcaacaataattacaatcatcatgttcacattataatatagtaatctggtagatcatcaaatgcttcttatatcaaaatgcagtcggttacttaaagctctcgcaagcgaaaaaaggaagtctctttactttataagataatggagacactaaagaaacagaatgcaatgatggatttctgataagataatacatcttttgttttaaaaatagaaaatgtgtttcttgtgaaatcttccatgctcatctaaaagtaaaagctttttttatatatataattttcatggggtgaagcttatcactttcaatgatatctgtttctctttgtcaactttggtaggttttgagcatgagccgacttggtggagccggtgcggttgctccacttgttactgatatgcctctttcatcatcagttgaggtaaaaactttttaagaacaaaaagtaaaaactttagtaatggggttttgattcagattttgcttaaaatgtcaataggatgaaacgggtgagggtggaaggactccgcaaccagcgtgggagaaatggtctaacgatgggactgaacgtcaagtggctaaactgatggaagagaacgttggagccgcgatgcagcttcttcaatcaaaggctctttgtatgatgccaatctcattggcaatggcaatttaccattctcaacctccggatacatcttcagtggtcaagcctgagaacaatcctccacagtaggatttctgcaataaagagtttgtacagctaatccaactgtccaacatgggtttttcttctgctctaatgactctggtttcttctctcctctctcacccacttgaaaggtaaaaaagtgaaaaaggctttgtagatggaatcaatgtaggatttgcagtagagggaaaaaaaatgtcaaaaagctcaattgatcaagtattattgtaatcattgtacctttattttaggtggactttgatgaaagcaactttttgttttcaagactttagtgggaggttgaggaaggagcttgaagggtgttatttattagtagtagtagtagtgggaagttgtgggaccttgttgagttgtgttcaaattgaagaaaaaacaagtatttgtaatttgtcaccccttgtattattatttattttgtatgactttggagtagtataattaattatcaaataatattattagtttgatctagtaaccatcctttgtttgataacactagaaacataaagcaaatattttaggagaaagtaccatgaattgtgcttcttttttttagtggtacgtgtacaattttaacttccaaatctcaaatgctaagatatatacactttggacagaacatgtatcaatttaaacttgcatgtttacattttgcattgattagtgaagacaaaatacaacttttattaatattgttagttttggaaaaatatagccaaaaaaaaaactcatcgaagaattaaagttattgatatgattatttcatgtgattcattaaatcattctgccaaatttattttttgagtaaagtttggaaaatcttgtgtcttttgaagtaacagataaaagttttgtttttattacaatttcacatgaatcttagagtgagataataataaacgaagatgatttggcaatttgtttaaaatgggtctaaattccaaaaccaagaagactacaaagagtatgcaaactcaatttgatgcggtacaggcgtcaaacatacatcgctatagcctttgcgttattgaaccacataaaactgcggcaaacagaacttagctttagcatgcatcaagatcacggaattgtggtggcttaggctcaccaagcagtgtcttattccctccttctggtccacacttgatcctcttcgggttctgagttccatgctgaaaaacaaagattaacattataagaagttggatttggattttggatttggattttggcttagaggctacgttctccaatttggaaagttaaccgaaaccagattgttttcccccaccgatgtaatgcaatagtaagagaagaacatcaggaaagtatccaaatgcaatgggttgttaatgtcttaccggtggcttttctccttttctcagcttttcaacaatttctacgactttctcaggtgtaacatcttcctgtgtattgtagcataagacagtgtaagtatgatttcactcttccgacgtaacccacataaacaataggataatgcaggagaaaaagaaaaattgttcaacgagatttgacatacgaaatagttatatgtatatccttctgatccattggaatagtcagccacagtgatcatgggtgcattaacacaacatccctgtaacaaaaccaaacacattagatctgcattgaatcttttcatgtgaaagtactaatcttggttattgttctgcatggattaatgaattgaggtgacgcaaaatccataccatgcactccatctctccaacagagaacaaaccatcctttgtgacctctgcacaaaaaacattaagaccaaagatcgttatgactgatcatcacctccatatgattttggttatgaaaggaagcacatagagctttaccaccgcgtttcactcccaaatggtctagcaaagctgattcgatgtctcgtgaaccacggatcatgcaaggtgttgtgccacaaactagaaggtgatactttccaacctgtaagagcaaaagaaaaatgagcctgcaatgcgtctttcattgagtacagtagagacttgagtttaggggtagaaagtacttcttacctttgctctgttgaacattgagtaaaatgttgcaacctcataaacacggataggggcaacttctataactttagcaacctgcaaaagtttgttgcattgttatgacggtaaaatcatatcaatgaatgttgtattccaaaaaagaacttaagaagtacataaaattaagtcttaacagagaaaatcgaacaaaaaaatcttagaagacataccgcattcattgctgaaacagggagccagcctccattctgctgttgtgcaagatctaggagaggaataactgcggactgcttgtaattggatggatagtaagagagaatctccttaacctacacattttggacataacaattcagtaagtctggatgcatgcggaaatcgatttcaccgttaatgcaagattactgtagccagaaatgaaagatacagtaaactggaactaaatgcacaagaaagtattaggatttaaactacaatgaaaccggtttactaatttctggacagtctttctgccacactagcagattcaaatctgttggccatttgggtcgttcactctaagtctctcccttaaatcagttccagaatagccgattctaaatatgtaacaacaaataagcaatcaaaaatatcagaaaatcccagtctttgtcttttaatatcctttggtagaatgctaactaagagaaccataattcataatcaggagacagggactagttataactagggtcaaacaaagggctaaagattagggaacgagggctaaagattccaacattttcacgaaagagtataaattaattccaccattacgaacatgtcacacaattccctagatattctgtaaacatcacaaaaacgaattcgaatccgtactggataaaaatccccaatgcgttcactaaaactgtaaattttcgtcattatcacattaagaagcgattttattcactgaccttagattggttagcctctgaaaactcccatggaagatcgggtttgttatcaggagaatccagatgctataagtaatcaaaacaacaacaacaacaaaaatcaaattacaattaatttcggataaaattagacaaaattgaagcatagatcagatagaatatccaacactcacgtagtttaaggccgtcgataagctacgagtcacctgtagatagaaatgaccaaaacggagaatgagatcgggaaacgaccggagagaagctgagaggaagcaaggaattagagaatacctgagaggttggttgacggaaaacttgacggatctcgagaagacgcttcgcagcgagcctagccagcattttcgacaatttagaggacgagagacgcacacgaaggttttttttgatctgagagagaaggagaagcagagaaaccaaggagctagactcggtatctcactatcacctggcgcaggattgactatagcctctatgggcctgctaaaataagcctgactttaattcattattggtctattacttttggtttaggactgatacatacgagtagctttaaaggcccattttattaattaaaggcccatacatgtaatacttgaagcccgttggaatttgctgattcttataatttgcacatctcctcgcagctttttcatcatagtgcaatggcatgattctttgtttgtttaacagaatctcaagcaaataaaaagtgagaaacatttgctcgatggagtaaaatgactccgcacctcaaaacatatatgaacagaatttctccatgtcgtatatatcattctctgtgtaggctccaaatatcgtctttgatgatccgttcataattcatattaacccaaaaaagaaagaaaaaagcacattggaatcaagtaatataatccaccagctccaccattaacccgttcaaaattgttattaaccttaacatacccgtctttgtatcccaataatatttcagatcatcatacaacagaaaaacggcttaaaatataagacattggtcctaagcagaaactattacggttctggtggactatagctaatgacgtagatgattacaatgatttttaatgttcggcgattgaggaaggcaccttccgtcggttcatctttgtctcattagcgttcgattataagaaatctcatattatttgttacgactttcccatccgtcaatataacacagagatacataaaacttaaataatatgatcaaggataaatatattagaaagcagagattcattcattaaggccatttctccatctccattcaatatttaagaaacaaaaatccacaaggcaaatttgcatcccaaaaaaaaagcacagaccgaatattttttaaaagagaaaaatagcgaaaatgaagcgataaatttgttttaggacagtctccatatggacttctaaatatacaagcagattcctttcatgagccaaccacttccatagttgttgtttttttgccctaagccaagtacctaaacatgttaggattctccttgtccctctccaaataatctctggttattaaatcctccatacgcttcttgatcgctttgatatcaggctgcaacaaacatcacaaatccaatgagtttcatcaccacgtgcatcttcaaatgtctctgtataaatataattatatgtataatttaccttgaacattcggctaagttgctcaacacactcagaaacaagttgttgatgtcccaatactttcctgctcttcatgatcctgacaatggcagcatcaattgcatatcttctgtctttatcgacatcttcaacgactttcttcctttcatcaactgggggaagagggatctgtgacgcaaatcacccaagttgatgttagttattaacaatatgtaaaacatgacataaacttgcagacttttgagtattactattaacgtcacaaaccttgattctgcgcattctatcggtgaatttggagttgaactcaaaggcatcattctgggagacagtcttggtgtttggctccttaaggagtatcttgtacttagcacatgacaaggaatgaagcaacctaactagatcttcatggcttaggttcagttgagccaagatctcagtgtaacttaacttgtcagttgtgttaaagagtagaagcacagcagcctatagagacagagaacgtggcatcagagtccgtttacagatagaaaatatatatcagtattttctgagaaacatacagtacctggtaagtagacactattaactcgatggccttttgatcaaacttcccgtttatgtgacaagttcccagtgaatagatccacgtaagcttcctgtgtttcgttttcgtttcataaaaccctttgaagacttcaacacacttgatctgaaacaaagaatcaacgaattagatctatcagaagcaaacaatctccttttcaggtatgtaagaaaatcaatagagtttttaccatttcactgggtagatttatgtcaaatgatttgtaacttggccagaaaccagtggtaagaacagtgacggtcaagtcaatccctgggtttgcagcagggttactgcctagataatcctcgaaactgttttggttttctcttgccagtgtcaaatccgtcacctgtcaccagcggattaaaattatatagaaaacataagtcatcagagcacgcaccgctttaaaataagaaacacagggacactcaaactaaccatgccctccatcttagaagtaaactgtccaccacattgttgcttgagctttgtcaggatacttctctcatgatcatcattagcactgcgatcaaataagagcctacgggccagcttcttcctgcaatcaaaaccataaacaaaatggcttgcaactcagtaatccaacttatgtcaatcaaattgtatattgttgcaaggcatctccacaaaaagctagtaaaaacaaaacattacaagaaaaacaaagagtagaagcaaaaagagtcgatccacagataaagaaagattgaagttggagataaacctgtagaactcagcgaaaagatccttgtcacttatgtatgcaagcaatttgacaacctgtaacaacattataaaattcaggaccactctttggagacttgaaaaagaaaaaacagtttgacaaaagtaccttctcaagcgtatcttcgatagcttcatcactcagcttttcacttcccccctttttgagaatattgtcgcaaaatgttgcaagtagttctgcacttgaacttccagcaaccgttttgttacaaaaaatctcaaatgcctctttcaaagcctaaaatatgtttccataaacttaggttagtaacacaacataaacatgaataagatagacaaatgacaagtgcgcagaaagaacattagaccttatggaagagggtgtggttctggaaacactcggtgacatataccatgtatttatcatgaagttcaatcacttttctgataagaacctggaaataatgaaaggacagtgaatcgttagcaattttatccccaaaaaaaatgaatctctaatttccaatatatctttactacaatcggtttataattttacctgttcctggacgctagcagtatttgcaacctgtggaataaaaacgatcttagcaatcacaaacgaagaaagaagagttatccgaatataacaagtaagataatatgaacctgattagtagccgtgtcttcggcctgttggacaagagcgttaccctctgctgtgacatgctgtgaacgaataacaagttacagttaatgtcatacagtaattaagagactgcaagtagaccatgaagaaaagactatccatttgctaatcataaacaaaagaatgaagataggtaataaacctgcttaaagatgtttgcaacaggttccaagcctcgcaaaattttatggtaaagcctgtacatcctggagagatcatccacctgaaagtagacaaatataaccattaaagaaataattaagtcactaactactcaacaataaaaacaaaaatacttgctctaccttgtcatctcttagcaatgcacggcaccctgagtgttctttttctagaagctgacttgcaaacacaaccagcaattcatgttgtactttctgcatacaaaagattactatacaagtcaaacagatatcaatctttaaaatcaagtatgcctggactacgcatttaaaaagagtctggaaagtatctcaatacaaataacaaaattcaaaatcaaggcttatgcaagatctatggtttcttcatcaaacctacaagtacaggcataattacatagtgcataataaccaacctcaaccagctttggctcactgcttgagtgtaggtagtgagccactctctccctctccttctttagacattcttcagactgtaacatgaaagcacagaagttaataaataatttcaactattgtgaaataaaaacaaattttagaaaatgatatcacgagtcatgccttcaacatgtaatcagggcaagaatcttcctgaatccagcttgatgccttgcgagaataatacgaagaagtatcttgaagcatgaagctttcaaaatcttcttcatacctctccatctgccccattccaatctctacatagatatctaatacgtttttcagcagggccctatcaatctgctcgccctcccgttctttatcaacctgacagaagaacaggtcatgttagaccttgaatcaggcaaaagccagagttggatgtaactgcacaacaatattgacgccatacttacaagagctattacagcttgtttgaccttagaatgtagctcattataaacctgaagcgaacagaatcaaggaaaagttaaaaatatttcaatacaactgaaagctataaagccacaggaatgaatgccataccaggtcacggaagcatgtcaggccaacttcattcagtggtggaagtgatctccgagcaatgaagtaacggtcaaggtagtagaagaagcgggatagccatctgaccattactttatggtttgaccatcttttaaatagctcccgcagcataaactcatcatgcttctccctcaacgcaggcaaaacctaaccacagacaacaagagagcaaacattcaaaaccgtttgaatcaacttaaaaccaagaggggacaggacttcttgacatatgaaaccatgcacaaaagtggcatcttaaaattcagaggtagtaaaaacgagaagtttataagaaagaaactaaatatcaatcagactcactgttgagttaatatattcctcaaatgcttcccgatacttgtcataaagctgctgtgagtaatcatgaggaggtttctgggtgcacatgttgtagatagtcctgagaatcaaataaattccccatcataagtatcaggacaaacagccaaaccgctatataaggtaataaacaagtataaaacctacgtataaagcatcatatattgctcagagtcaaatgctggctcattcaatccttccagaatccgtttcagcttagtaattccagtctgcatatagtcccatccttgctccaagtcaatagtcttgcgctccatgttgacaaacaacttttcaagctctcctcaacctaagttaaccaaagaacaaggagaaaaccaaaatttagaacagcagtattaagcaacacaatgaaatgactgaagcgagagagtcaacaatatttatcattcttcagaggttataataacacgttaacacccacattatcgaatgcgaaacgagtattatcacccaaatcaaacccaaactatcagattgtgcgcaaacgaggacataagcatcagaatatactcgagaaacaatcaatccatgagataaacacgaaattacacagtagaaacgcaatccagagactccgacgtaaccctaacaatctcgatcccacaaaaattcaaataaaaacctagaaagacgaacaatcaacagaatgataaaaaaatcaactgtcgtatggaacaaaacaagcgagaatccgacagaaatagtgatacctcgagatcttaaaccctaataatcagaaaatcgcgtcgccgtaccccaaacagaccctgacgattaccgattcccgattacacaggatcggcgagagctgctgcgatcgaaaaagaagcgagagagagagagaatcaaaaccctaagaatcgttcaggaaaaaagcgtaaaatagagagaaagagagacgagacctatgagaagggcggtgaaaagatatctcaggaaacaaactcgttctcttctattctattattttcaggtcttatagatttaattatttttattttatgtcaactaatatattagtataatattaaacaaatttaatttcttaccttttcagagatctacatcaagacgctgcgttttataatttttctttgtaaagtaacttatttacttttatgcccctttattttgccttccttactcaaaccctaacccgaatcggctttttgacaatccgaaattaggtaaccatgttcattgaatttatcgtttcaacacattcgaatcactgagtcctacgtttcagtttaattccctgatgcacattttgaattcggtttgcgtattggtcttcgagttttccgtcggcggccatggacgcgttcaaggaggagatagaaatcgggagctcggtggagtctttaatggagctattggattcgcagaaggtgctttttcatagccagatcgatcagctccaagatgtcgtcgttgcgcaatgcaaacttaccggcgttaatccccttgcgcaagaaatggtgggttattgtttctatgttttttggtatctaaagttcgtgttttattggggtatggtgatatgggcaaagctgagagggacaggtcattcggattttggaataaattctttgaagggtattgagtctagcaaaaattagaggtgtttttggtataaattcatatagctcgacctctccgtttcttctgtgaactgtaatggtgatgcttcaactgtttatatgtcatttctctgatcaagtaatcatctctgttaaagacattaatctgtttaatttttttgttgtttcaggctgctggtgctttgtccattaaaattggtgagtcatcttaggattcgtgagatcttttggcataattacgtatatcacagagaatgtttcaattcattgttgctctctaggttcattaaaggcatacccaacttttacgtgctcgatgcctagtatctgatgaatttgtaaatatttcaggaaagcggccaagagacttgttgaatcctaaggctgttaagtatctacaagcagttttcgcaattaaagatgctattagtaagagggaatctcgggagataagtgctttatttggcatcacagtcgcccaggtattgttcttctacatgatatgtactcttttttgccatgcttttagaattccatgtcagtttagatctgtcatgttgaggtactcatgagactttggtttgtctctttattattttcttcaatggcaggttcgagaattttttgttactcaaaagacaagagtgaggaaacaggtgaggctttcaagggagaaagtagttatgtccaatacgcatgctttacaagatgatggtgttccggaaaataacaatgccacaaatcatgttgaacccgttcccttgaactctatacatccggaggcatgttctataagctggggtgaaggtgaaacagtggcacttattccacctgaagatattccacctgacatcagcgattcagacaaatactttgttgagaatatattttctctgctgcgtaaagaggaaacattttcaggccaggtgaaactaatggagtggatcatgcagatacaagatgcttctgtgctgatctggtactagttgggggttctctttcacccactgtcttattttattttattgttattatattcccgtcttgacagtcattttctatatgtgccacaggtttttatcaaaaggaggggttttgatacttacaacatggttaagtcaagctgctagtgaagagcaaacaagtgtcttacttcttatcctgaaggtacgagattaatttacttgcagctggatggctgtaaaaatatgcagattgttttattatggataattgacatttaacacgcaggttctttgtcatttacctctccacaaagcatctcctgaaaatatgtctgccatattacaaagcgttaatggacttcgtttctataggatatcaggtgtaatttctgaaaaacctaaatgctgcgtagctttcatcaatgccaaagttcttgttgtgatttattcgatttcatcatctgatttgaagatcagacatatcaaacagggcaaaaggtttgttatcaaggtggaccaagttatttgcgaaaatccaagctatgaagaaacaaaatcgtaacagttcgcaaattgattcgcagagtcaattgcttctgaaacagaggcaagttttggtttatgtgtcgaataatacttattttacctctcattttgttgtttagtgacattttactcatagacttctgtcttgttatgcagtattgctgaaatcatgggtgatagtagcaatcctgtaagtggtgcaaaacatgaatttatttctattacgtgcatcagttccttaaaaccgtttttcgtgtcgtaacaggaagatattcttagtctctcaaatggaaagtcagagaatgtcaggtatcagtttgattgttaaattccatctagaacaggttcccttttgatagttaggtggtttcataattactagttatcttctggtacaggaggattgaatcgtcacagggtccaaaactgttgcttacttctgcagatgattccaccaagaaacacatgcttggttcaaatccatcgtgtatcctttcgtttgagctcttttattaaaaagcaccagttgatttacattttctcaatgcattggataagttaacgtattgaacttgttggctacttctgttatttagtcggtattttacatgtgaaacctgctatgtcaagagagcaaccaaatattccacatcatgttatagtccttttcctagctcaggataatccttcacttcaaagttagtttccttagctttcagcagataacaaagaacgcaggaaagtacagatggtggaacaaccaggccaaaaagctgctggaaagagtccgcagacagtaagaataggaacttcaggtcgaagccgcccaatgtctgctgatgatattcagaaagcaaagatgcgtgccctttatatgcagagcaagaacagtaaaaaggatcctttaccaagtgccattggtgattcgaaaatcgttgctcctgagaagcccttggctcttcattcagccaaggattctccacctattcagaacaatgaagctaagactgaagacacacctgtactctcgactgttcagcccgtcaatggattttcaactattcagcccgtcaatggaccttcagctgttcagcccgtcaatggacctttggctgttcagcctgtcaatggaccttcggctcttcagcccgtcaatggaccttcggccgtaattgtcccggtacaagctgatgaaattaaaaaaccttcaacacctcctaaaagcatttctagtaaggtgggagttatgatgaaaatgagttcacaaactattctcaagaattgcaagagaaaacagattgattggcatgtaccaccaggtaatatcattcgttggatttatatctcgttggccacttattgaataagctgaatgtgactctttagggtcttctttggttcacttctattttggtggttagttaggactcattctaatgcctagttttcttcaggaatggaacttgacgaactctggagagtagccgctggtggtaatagcaaggaggctgatgttcagagaaacagaaaccggcgagaaagagaaacaacatatcagtctcttcaaactataccgttgaaccctaaagaaccatgggatagggaaatggactatgatgacagtttgacccctgaaattccatctcaacagccaccagaagaaagtttaacggaaccacaggattcacttgatgaacgaagaattgctgctggtgctgccacaacctcttcatctctaagcagtcctgaacctgatctcgagttattagctgcgttacttaagaacccagatcttgtttatgcactaacttcgggaaaacccagtaatttagccggccaagatatggtaaaactgcttgatgtgattaagactggtgcaccaaactcaagcagtagctcaaataaacaggttgaagaaagggtcgaagtttcccttccatctcccactccatcaactaatcctggaatggtgcgttacttgaaacctattcaccccaaattcctcggacatatccaaaaccctattaatagatcatgttgccaaattgaatctcacgacatatagaaaaaaggaaagaactacaacaggctctagctaacaccaaactggattatgaattccagctgttagatctaacctgatgagtacaatgcccccattagaagatgttaatgtctgtttcttattctcttactgagttaagtgtattgttccaattttacagagtggatggggacaagaagggattcggaatccattttcaaggcaaaaccaagttggtactgcagttgctagatcgggtacacagcttcgtgttggttcaatgcaatggcatcaaacaaatgaacaatcaatcccacgacatgctccatcagcatacagtaactcgatcacattggctcacacagaaagagaacagcaacaatatatgcaaccaaaacttcatcacaatttacattttcaacaacaacaacaacaaccaatctcaacaacctcgtatgcagttagggaaccagtaggacaaatgggaacaggtacatcgagttcatggaggagtcagcagagtcagaacagttactactcacatcaagaaaacgagattgcatcggcttcacaagttacttcataccaagggaatagccagtacatgagtagcaatccaggatatgaatcatggagtcctgataatagcccaagtaggaaccagcttaacatgaggggacaacaacaacaagcatcaaggaaacatgattcttctactcatccatattggaaccaaaacaaaagatggcgttaaaccatatataagactatggttctttggtcctcaatatttgcttgtcatggttgaattagcattatactctgttcagacacagattttcatttttaactcacaacagattcatcagagataataaactaaaagaaagaatgaatggataaagttattactgtctcaattggcttcaaggcttttcaaaaacaagtcttgtcttcatcattattcgactaattccaaatctgattcaatttagtaacagtaacactggctaaactggactgcttcggtaattggagattttggtatacaatatccatttctgtgaagattgatagaatgtggatactgttcttattcgtacacaatttttgtttacaaagggaacactatatactgttcctattggtactctcagtttaaaccgatatcttaaccggttgggatggataaccgggtttacttttgataactaaaagaacccagcatatagtttaaggccacaatctcaacttgcaaatacagagttaacagccgtttaattatcgttcttatgatttgttctttgttaaatgataggtcaaaaattatttatgtcttttctaatttcataactgtgaatgtttattgaatccacattactcgtcaccgaactaagtaagcagtctctaaattaagacggtgatagacagtgctcttcataaatcgttcataagtcgttcaaacttgtattagccaaatcattcaaaaaacataattaagagatccaaaaacagaagattaaaattaagaataacagattaatgagagaaagagccaattagtcagataattgtagtctgagttttggtcgacagaataaattaatatatccgaaaaatcgttatcatcattccatcggctctttctcatcgtcatcaatcttaaacagtaaaaaccaaaccctaattttcccgagaaaactgaattgtgaatacaaataagcagtgaaggctcagaaggatccattggtaaattttctaatcagagaattactcataaaataggtagtttttaatcatcactgccttcactctaaaccctaatctagccgaaatcgaattgaaaacaaaaatggattcaaatcttcagagaaaatcaaaaattgaaaaccatcgaaccaaatcaagcaacgaaaaaagaagagaaaaaccgaaacatgaaagaactactttgtggaataatcgatcattagaatgagttgattgagaaaagtaatcacaggcggcaatatataagacaatggaggaagctagggtttacgttttcgaaagaatcgggtcggtcccgttaacccgatgagtttgggctttgtgaattacatcaaactcggcccattgagtatctagtttcgggtttgacccgttatacatgatgccacgtagaccgagacgaacaaaaaaagccagagaagaagaagtttcagagaaattttccgggaaaaggcgcaagaaaatatcagacaaaaaccgattattattctgggtccattttttcaaaggtttattaaaaacgcaaccgttttgtcaaaagcgataatgagaaaacttcttcgacgactctgggtttctcgggaaacaagtactcagagagagagagatatttcgagaaaagaagaaacactcctccgatccatacgaaataagataaaggggaaaccaaaccctaaatcgagcttctccttatcggaaatgtcgcacttccaccacttttgactcctccgttcatcggcggcgatctgaatcaccgtcaatctgatttcgtttctgtgaaggtatacgcatttgatttctactactgagagctgatttgagttcttttttaaaaatcattagctaagttagtttcagagctcttcttcgaatatctggaagagagacgagtttaggtcgatcgattttgaaaatggtatagagcttcgtttatttgtgagaacgaccaagctttttctattgtgatgttatggtataatgatatgcatagaattctacgtgaaccaggaatggatcaatatgggattccagtagagagaaaagagatgaagcataaggggagaaatgttatatggtctgttggaatggataagtgtttgattgaagctttggctgtccaggccaaaaacgggaacaaagttgacaaatgttttaacgataaggcttacactgctgcttgtgttgcggttaatactcgtttcaatcttaacttgactagccagaaagccatcaatcgcctcaagacgatcaagaaaaggtacagagttatgagagacatacttagccgggatggattctggtggaactcgagcacaaaaatgatcgattgcgaaagtgatgagctctggagaagatatattgctgtaagtcccattatcccttctcttttactaagagatcatccttcttttgtgcatcattatcaaacttaaaaatggttggaataggtaaacccagacgcaaaagcatttaggggaaagcaaattgagatgtacgaagaacttagaacagtatgcggtgactatcaaactccaggtaaatataacaaagtgaagaaggaaagcagtcatcatcttaatgacgtaaaacaatttgaagaagactctgtttccttccctttaggaagttctgaagaacatagcgatacagatggaacagagtcatacgcaggagcaagtgagtatatgcatgaagagtctcaagatcttcctcctcctcgagatcctttaagacgaccttctaaacgttctcgaaactcggatccttgtcaagaagcaatgttagtggttgcttctagcattcgccgcctagctgatgcagtggttcaaagcaaaactttgattaacacagaggaattgttgaaagcagtgatggagattgatgaattggaagaagcaaaacagatgtatgcgtttgagtatctgaatggtgatccagtcaaagctagagctttcatggcttataataataggatgaggaagatgtttttgtttcgacagttttggtggtggaagtaaaaaaattgatttgctgctatggctaaaagaatcctcctcttcttttggggtaatgtagagtcttgttaatgttaaaagctggaaatatttgttgaggccaatttgattttgttgtgaattcatttggtctaattttaaaccacatgatatagtttataacagacattatacaggtcatatacttcactttatctttgcacaattttttggactaacgaaagcaacctgctaatgccatcactgcagcttcaatgaatgcatcctccccctctggtttcgatacgaaatatttaattactcaaggcagaagagtgtttttcttcttcccttgccttctctttccagtaaaacctatggagatcaaagtatgctgctttcaaagcatatatacgataaatatcatactgggtatagcaggataagttttgaagcaaagactctttctttacttagcaggatatatcataccgggtatatctttctccacatcagagagcaatccttttctcctgagatcctcgaagggcaacagcagatcagaaatccacaacacaaggccatcatatacaaacgatatataagcacgatcaaagtgcaaaactgatcatctggtacgatttaagtaactaaaaatggatgctgatacaaaagaaagggttatcacatccagaaaaaagggattcagagaagagggtttgggaaaggatggtaagggtttggctcaacagtatcttcctttctcatctcatgtgtttgagattttgggatattagttaaaagaaggaagtctttcaagaatcacatgcaaagaaagatacttcttttagaaaaatttccctggaaacatctcataacaatattggacatatcattgtttgactaatcaatgcaacagaatgcaaattcataaatatttctcttaacaagaaaaaagtaaatgaagctacagggttacttcttccacataatacataatatggaacaaaatgctaattcattctctttgagaactgttttgtatggacagcgcctctcacaacgggggcaaataggtctagacatatgatgattgttcggcaaagcatatacttttttactgcctcttatccacgatgaaccgggcttcatgtataagtcccaaccaagcatacatggcatgtgtaaggtgacacaacaatactcatcacacatgtaaaaccgctcctttggatctatttttccctcgcaaacttcacaccaatacgtcatggtactagtcttctccccataagaaatagtgagcatatgcttatcatgcttatacctcgccttatgaggtatagtagcacatccaaagcacaaagaaaagttacactcctcaatgcaattgaatgtttcactaccaccccttcttaaattatggcaaacattacatgttctttgctcctcttctggtttggatgttaggaataaaggatgcatatgactttcgtggactaacggctcagaaattgtggcgcactgcacatgtaccttaaaataacatgcttcttcattgcactcatagaagaaaccagcagtgcaccacacagaacaagctgaacatgcaaacgcatgatgctcaccttcgtatgttctggatagagtgagcagatgaggatgtgtcggatgatgtattttacgacgaaaattagcacatttctcatggagaatgaaatcacattgcatacaggagaagaagttaccaaaatagataggcgtggtacatgcttgacacaacttattctcgtcgtaatctctgtctgtgttcacatcaagtctcatatgatgatgctcatgactgaaatgttgtataattccatcgcttatcgtcacaaacgactcgacttcttcatccatgtcttcttctggctctccttcaagttctttaccatcccacacattggtctgtgtggcacatttcgaatgagccgcataggaacagccgtccttgacgcaagaatagcacccataatcattctcgatctttctgcgacaaacaccacaagaccaatatttttcagggtcaaaagaaggagtaaacgagatacgatggggatggcgagatatccttatgacacgtggtaagctgaaacacttttgatggataacaaagtcacaagggggacatgtatagaaaggaccgcttgatgtatagaaaggaccgcttgaatgtgtcaaggcacagatgctgcaaggaaatggagtctgcgttggaaacagagcaagagtatgctcatgccacttgggatggtgcatagacaactctggtggtttctgcacacaagcaaaattaacagcaaactcgcaagcggagcaataataaaagatattcttgagatcttcatcgcaacaatagcatttcctcgtgctactaagcatttgcaaggagacgaggagaagaggatgtttaggatgaaaagggtgtttgatctcagctggagccttgttatattctttatggttcttgccgttgcaaccttggcagagaaaatgggaagcgagttctcctcttgttaaccagaatttctgccagttgaaagggagacactccagcttgccgttccacatcttgtatttgggctccacatgaaacttttcctctttcaaactaacatttaagcgaggacataaggaaataagcttgtcccactgtgtatacatggagaagacaagggtgactatctcaaggatgagtgatatgagcttcggctccggctcaaaagtcaatgttttatcaacgagcgacatgaagtcccaatccagggccagctccaactctgaatccgaaaaatatttttgagaaaagattgatataagcttccttagcggctccggctgggaatccagatccatagagttgaagaaagagattgtttgagtaacgacagacatgagctccgactccggcagcgaatccaaatccgtagagttgaccagagtgacaatttcaactatgagtgatacgacatttgcatcccggctcgctaacgtcttcgtatagaggagaagcttcgcatcgtatgtgagagactttcccgtaaagattggtgggatctgtgtatctatgagaggcattagtttcttaatgagtgaggcgagcttcatctctggcggctccgagtatgtagactcgacgagagagactatttgatcaaggagtgatgaaagctcatctgaattcctagattcgagatacgagtatatttgagaaatgagtgacatgagctccggctccgagtcctgctttgtatccggatctgaatctatagatctgatgagagagattgtttgcgtcacgagtgataccaccaattgcgactccggtttgccgacaaagattattttctcaatgagtgagatcagttccgactccggcttctgctgtgaatcgaaatccatggaggctagagagagagagagagaaagaaagagagagatttgtaaattaaaaaagaactgagtcctcctcgagacactttgtagcttgcggataacgagacaatttcaaatttccagcctgtgccagcggaaagtcaacaatcgatctaactgtaaactaagatcaaatatatgtattattgagggtttaggttggcatgtgcaactttcacatattttctggagaaatcaaatataataataatcattatcattgattgaatgatcatttttgacttttgatggcgctcctcctatcttccaattagtagtaacttttaagggttaagttgtatactagtcactttttaaaatttaattgaaaaaatagtcactttactatttataatttgcaaaatagtcacttttcactgtttgattcgtacacttagtttgtacaccacttttagtgatcagatgtatataaaaaatacacagcgtacactttacatttgtacaataaaagtgatgtacaatccaagtgtacgaatcaaacagtgaaaagtgactactttgcaaattatgaatagtaaagtgactactttcctaattaagtttgaaaaagtgactattttgccaaaacaccccttgaacgagatttatttaataaatactgtattaattaacgaaagaaattttaaaactttaatgacaaattgggtcaagtaagaggaacctgagattctttcgaaacagtattctctctattcgtcgaaaattgggactaagaacatcattattggtagtatcttaggttagtcttagcttagttcttaggatttttttataattgattttgaaaattttgaaatgaaagctaagaacatttcattttatctcttatgtaaaagactcttttaacaaatatatgattaaaaagccaaaattttctaataattaacctaagcaactaccaataaatgtgttctaacgttttgatttaatctggtatttagggtattttgtcattttggtttatctcttatggatttttgtttccatgtttgttgtgtggcattgcttaccaatacatagaatagaaacaataaatgaaactatgatgcttttcttacttaaagagtctgaggtcatcaaaattcaatatgtagagtgagtgagatgcaatttctatataaccgaaatccaactgcattattgtttgcatctggaagctcctctctttctgatgtattttatctacaaactaaaaattcatttgtctatcttgatgatggttcttttcttctttatcctcattttaacaaatattcgagaatcactttcgctatgaacgtgtgctaacatggatatatttctttttaatattcaatattgtgattcaaaccaaccatcgaattatatcagccttctttttaccacagtttggctcaaccaagtttcttccttttatttcaaatgagattgtttgagagattttgaatatgactgtatgtaacgtattgtatgcgcttaaactaaacttagtgctctccatatctgtttttactcgcattttgtcaactattgagttttatattgcccccttagctagtggatcttgtcgtggtgtatgcttattttgagataattaaaatcgaaagcatgatatcatcttgaagtttacagactgtccgagtgcaaagtctacgaaagatttaaagattagaaacttgaagaaatcaatgtgaaaattaatggtcatttacacatatatatatgtgttggggaaacaacggacaactgtacagcaataaagttccaccctacatatttatgtgagtttgtgaaaaaaaataaaaaatattttgctagcaaaaaagtaaaaaataaatgagacaccaaattatacgtaaaaatcatcttaatgtgaagagtaaaaactatgggaccgtagtacactcaaaatttcagacacgaccagcaaatgtccaaacgttctacacaaaaaaacctaacagatctatttttctcctcctctagatcttaaacctctcttttcttttgtttcttatacacaaacaattaggttaagagtgtttatatactccctcataacccttacccaaattccaatctcatggattaataatataaatggttgaactccaagtttggttctccaaatcaaaacccaatttggttcccaccactaggaggaaaaccaacagactcccctccgataaagtactggaggaaacaacaatcctgactatgataacatcgtatttttgcatgttttagatatagattttttatgttttaaaaaagtttttgtttgattttcaaatttttttagtactaatgtagtttatacgagattaatattgtagtctttaatggactgtatcaaccaaacctgactttgttggggcaatttgtggtaattgtatatatgaaaaaatggtaatgggcttgaatatcccacgaagccttttaccaagaagtttcacgcatcccacatcggaagggtaagagagtttgatagtggaaacttttatataaatagacttcactctccctcagattcaaatttcgcagctatgtggtgagcacaaagcgaactattctttcgccttttactaaagaataccgtgtgctctccacgccaagtggcttacgcctatttttggagggcccttacttaatcgtgaggcccaacatttaacctagtctgaatgtttcatttgctaaaaactttgtttgttgctactgggcccaaaggtttgaaaggccagttcaattgaaatatcgcataatcaaattgaatttaatctgcaagaccaattcgttaatcaataagagcatactaggatttcaaaccaaatgattcagttcaacgatgttttaaattatcatctagaaattataaaatgtgtaataaagcattttttttttttttaaacttgacaaaatctctaaatgtaaagtctaatataaaccttaaaatctaaaaactaattatgcttgtttttgagaaatttttaaaaaattgtgaaaaagaaaagtaatgaaaaaaatattgagagtgagtgattggaggaaaataacacaacgcaacaatctaacaaagagagaccttatcatcatcagcatcaccttaacccatataacattcctcttcgaaaatgccaacaacaaatttcatagagaagcagaaatggcgaaatcactcctttgttcatcaaccttaaaccctttcttctccaccactctctcctcttcgaagaagaaccaaattgcatactcgggaaacagcaagaaccagacatcgtcgtctctgttatggaaaagaagggaactgtcgcttggatttatgagcagcttagttgcgattggtctcgtgagtaatgacagaagaagacacgacgcgaatgcagcgattcttgaagctgatgacgatgaagagcttctcgagaaagtgaagcaagatcggaaaaagaggattgagagacaagctgttcttaattctgctgtcaaggaaaagggtacttcttcaattttcctctaatctttcatttatgttcctcccctgctacatgaagtaaattgaacaaattgatggaaaagtttactcttttatggaaaaatgtgtgttctttgtgttatggttcctaggctagttacattgaaccctagtctggttttgtttcatttatcttggctacatgaagtaatcagaacaaactgatggagaagttttactcttttgaggacaaatgtgtgtcctctttgtgttatggtcccatggctagttacattgaaccctagtctggttttgtttcatttatcttcattcaaggccgtatgaagtaatcagaacacactgatggaaaagttttttactcttttgaggacaaatgtgtttcctctttgtgttatggtcttcacagaatcatagttaaatggtttgttccagtgccatttacattgaaccctagtttgattttgtttcatttttcttccttcaaggccacatgaagtaattggcacatattgatggaaattttgtgaactcttttggggacaaatgtgtttcctctttacgttatggtcgacatagtaaaatggtttgttccagtgccatttacattaaaccctagtctgattttgtttcctctatcttcatccaatgctacataagtaatcagaacaaattgatgggctcttttggagacaaatatacttaggtcttcttggttctctaactaaaagtatatagtgtacagggtatttgcaggatcttgtttacaagttgagcaaggtaggacaagccattgagaacaatgatctaccagctgcaggtttggttttggggaaaggcattgataccgaatgggtcaaaaccgttaatctggctttcacaaaggtctttcttgctcattttaactttcactaaggtcaaatctattggtccaatgtagaaacaactggttaaaacatcaatattgtctctccctctctttacataaggtagacttttttttaatgtttatgttactgtttgttgaaaagtccttgtttgtgttcttggaacagttgagtacaagcccagaagagaatacagaggtggaagcattcaattcatcattggcttctcttatcacatcaggtcttgtacttgtacttgtacttaactttttcattcacaagaatcaaaattgtcattaaaacattgcagtgatctctttgaaatgtggttttgattccttttttcgcagtgaacaagaacgatatagagtcatcgaagctcgctttcgtttcatcagctggtgcatttgagaaatggactactttgacaggtcttttggaacagcttaagggactgtgataggctggctacaaattctttactctttttttgtattttccaacagatttgtcaaagagggtcttttttttctccaaataatcctttgaataatcatcattcactttcttaacttctttggttattatttacctttatacattttgttcatacttactatgcatcaatatcaacaaggttgatttttccatcgaattccaccacaccaaaaggaaccaagaaaccataccaaaacttctttggttatttatctgaaactaattcaaaaagatctgatcagtaaacctttgttctattgaatctcacattaagagaaacccttttaacttgagaaggcatacagatatagagcatcacaaaatccccgaaacaaaaccgaaccagtcataaccaagaagggggaaagctactagatgaagctagtaggtggaagtttgagtcatttggcctattactacgcactagttatgatcttttctctgatacattgaatactttattaaaaaccattacataaccaatgtaaaagcaaatatttaaacgttaaacagtccaattcagctttgaaaaatcctcccagaagaagaagactagtcaatattggttgcgatggccttgtagaggcattattatctgttagataatattaaacattaatgagaaagtagaaatgcttctgtataaataccttcattacttgtgtcttatttcatcaccttcaccttcaacatcaaacatcacatttcttcctcttttctctcttttttctcagtcttcaaagagtttcttagtaacccaaatcaatggcaggtatcaaagttttcggacacccagcttccattgccaccaggagagtcctcatcgccctccacgagaaaaacctcgactttgagctcgttcatgtcgaactcaaagacggtgagcacaagaaggagcctttcctctcccgcaacgtaagtatatctatatatctatgtgttgttgtaagacaagagaccaactgttttcatgtatctggcctgcatctcaaatgttttgtgtttgaacttctttcctcttcagccttttggtcaggttccagcctttgaagatggagacctcaagctcttcggtatgaaccttttccatgcatcatcttcaatctcaactctgagttgacaaaagccattagagagcaaaatcactaataagaattggatttttttatttttattttgtgtagaatcaagagcgattactcagtacatagctcaccgatatgaaaaccaaggaaccaaccttctccaaaccgactccaagaacatatctcagtacgcaatcatggccattggaatgcaagtagaagatcaccagttcgacccagtggcttcaaagcttgcttttgaacaaatattcaagtccatctacggcttgaccacagacgaagccgttgttgcagaagaggaggctaagttagccaaggtccttgatgtctacgaggctaggctcaaggagttcaagtatttggctggtgaaactttcactttgactgatcttcaccacattcccgcgattcaatacctgctcggaactcccaccaagaagctcttcaccgagcgtccacgtgtcaatgagtgggtggctgaaatcaccaagaggccagcttccgagaaggttcagtgagaaatttctaaaaggaaaatatggttttgcttcagtcacagtaataatgctaagattaaataagcggctttctcattgcccaatttctcagtactttctttctgttgtatcctctgttttctttcagttatgtgagtgtgtgtgtatgctcttgagagtatctttggcaaaaactatttatctaatcttcaagctattctaaaataaatcaattagttaactaatgcaaagattgcgatgtcttaactatggagatactgactagtgagaatagtatgtaaggactttagtctggtggaaatcttactttggaacgtttctcctggcgaaagaagttgacttaagaagactttgaacgttcttatccttaaagtttccttgctttgtcatgtctgaaaatgacaagtaaaatatagacgtaagcttcaaatcagacaaaacaaaacacatcagatttctggacctattcacctctctataaataacagaaacggttagagcagcaagtttgtgtttttcaccatcaattttgtaccttgaccgccgtaaacgcagggtgaagaaagtccacctagtgtttatctccaactgtttgctcgtctcattactctgatgactttgtggctacccaaagaattgcgagtaaagccagccatatatttgcagactctggtcatcctttaagttagaggctttgctacatcaaatattcacataaaccataaagattaagtccaccaagaaatatcctttattcggagttttgtctgctagtatcatcaagtttacttcaccacgatactccaatagtttccagatattatataagaatgaaaatctattacaaagcatttttataaaaaacataccattgccttcaagggaccaaggaagaacagtaagatcctggtgaagaacacaatgagatgagggttctagtacaaaatcttatcaacagttacaggctacgcacctgctttaaagattcttcaccgagtgatttgtatcttctgcagaaatttagtaacaaattagcaaactcaaaccaagcaacatcattagcatgagacgtagaccaaaagaagactgaactagattccattatctgaagaacagcaagagaagctgagaagggctaatgaaagtgaagaattactgatacatgataaattaaatccgatgggaacctctcaacagaaccaaaatacaactttgataaacttcaacaaagtttttattaaagtgggggaaaaacatgaactaaaaaccagtaataaaagaaaagatcattctgcagcattcatcagcatatttagtacatgctgtacttgtcgttcgtcgcttcgggtcgaatgctcttgtagatggacatggcaattggaagaatggctgtgagagcgatttgcaactgatccgagctgctggttctgactgtgatctgtccgctcatcttgttgttaagtcctgcacgaagcgcaatctttgagttccttccaacagagacttgagattggagattggctccaagggctaaatcgcctctccactttaccagagacagcccaaaagaagattggtcctgtccaattgggaaatcagcttccctaagcctgacctcgaggttcgcaccataggccgaatctccctgtgatcgcattgtcccagtgctgcccacaagcaccaaccttttccccagtgctatttggtcctcgagtttgaccccagtggcgatgttctctcccaagaatgtcactgaccctccaacagttgtcttgttcttcctcaaattcttgaatttggtttctcctctgaccacatatgccagctgcttgcctacattctgaatatcgaaccctgccatggtggatccattctccccgtgcttagcagacacagaggagtccagatgaatgttgaactctttcttgtccttggtgacttggacagtagctgtggcagggaaccggctagctagagcaagactgtgttctgcattgacgccgtcatatccacagtcatggtcccaaccatgggtatccaacactggcctggttaggagttgtgaagtgggttccagatatcggtatcggtaagctgagttatcactatcaaatgaaggtggcaaaaccatatcgggtaatggaactggcactgcagctggagccccgttttctggatcatcttcttctcccggataaccaaactcactttcacccagcttcttcccgtttttcttcatttctttcatcctctttaattcctctctccattgcttcttctgcaggagctttacacggtaatcatactcctcgaaatatgcctttctctgttcatttgagagctttgcaagttgggtttttcgaagaggcttaaatggtggcagctggtcatactcatcatcttccccatcttcctgctcagaatcagacacatcatcaatttcgatatcagagtcaacactatcaccaccttggtctccagggagcttaggatgtgcacgggactgcaacagccaagacaacaagtaagggagaggcggggatctaactcggaaaccaaatactttacgatggtccaatggttcttgaggcctcaatagagaatttgtttctgacaaaaccttcagggagtaacacaatagcaacagctgagatctccaagtttggccattcgggagaaccttcactccctcccggttcttcctacacaaggggtgattctcaacaagtgaaactggattcatcagacttggattcatcaagcgtagatctccaacagcctgtcctatagactgttgcacaatatgtgagcactgcgctacaaacacatcatagctcaatggggtgccagatgggccatcaggaggggcagaagccgcatgggtcaatgtcactatagcgtttttccatatggatgtaccaagagaagcagtaatcgtccttagcaagggcaaattgttcaagtccctggtctgggtgtcaagacgatctacatatagtacaatatcagggggacacttcttcattaccttctttacagaggacaacatttttgcatttgtactttgatccatcgcagcagacttcaaacccggagtatcaataaaggtaatcttgacaccattcaccgttccagaaatttctctaaccgaagtggttgagagcccaaaagcatcaatggacgcaatctggtttcccaaaatggaatttatagtagcactttttcccaccccggcttttccaaggaccagtatgtttagggagaagatcaattcttcgttgccctcagcctcagactccacagccttcttctttgcagcatcaagactgaataactgccctgcttgtctcccagcaagtagtgcaagacggtaaagaacctgcgctgcaattgaatcttctgccgaatgacccaacctttgcaaaagccgcaaaaacttcacacggaggctttgcaacttttctaatttctgtttctcttcctcgctcaagttaatctcagtctcatctgccattgtgacattagaattggaaaagatgttggaacggtttgcacgtggagctgctgcaggcttcaagggccttaacgatgaactcaaaccagcaggtcgatccatagagaaaagcttcgtgccatcctgagatgttatggtaaaattgccaccttctgaacttccaccaccagtggctgccttcaaaagcgcagccaaagctgcagtatcaaacattttctcctcaccttcatcctctgtgtctacatcctcgtcagaatcggtgacaatctggccatcaatcctatctgacatattgttagaaatgtttgcttcatcagaatgtgcctctataccagaagaagccttttccaactctgctaagaactgttttgcagcttcagaactcccaaatatcatctcttcagtttcttcttcactttcagacccatcaaccctggtaacaccttcgccagaaggttcctggtccacttccttgcctccaaagctaaactcacgagaagaaacaatgtcttcgactgggagcttgttttcatcctcttcagcactgtccccttcgacaactttccgaacctcaaactgtgactcagctgcaggaattgaatcctcttctgcatcaactgaacccacttttaaactttcagaaacaggcaattcttctacttccacacctacttttggttcgtctggctctactttggcagcctctgatatttccttaacagccaattcaaaatttccatcatatgcagcagtcaggtcatcaggttcctcaatatttgagatggtcttgtcaacctcatcatctttatcatcttccttaattacagcctccttagccgccccgacaaccacaacccctggctctgcaacattgatatcagcatcaacagagtccaccacagaggagtcaaccatagagtctccttcactaaccaactttcctcctccctcctctgtggctttatcggattcaagttcaacttcaccaccttcaccttggccaattggatcaaacttattatgcacatcagggatgttgccatcagtttccagcacctcactcacctctacgtctccaacaacaacaacccctggctttgccacatctacattcacagcttcaatagcagatgagtccaccacaaagtctcctttgttgtttaacttaacaccttcttctgcatcatcgactatgccaccgagcacactctcctcctctttggttccattgtcagctactgcactagctgccttgattacttcagcataagtcatacccttctccaatccgttggctttttccacatcctttggttcactcccactctcggcagctacaacctctggctctacagcactggtatccacagattctaacttagaggagtctgcaatagagtctgattcgctagtaaatttttcttctacctcctcaatggccttgtcagacacaggttcaaattcaccactatcatcatccccaatttgatcaaacttattagccacttcaagagtttcagcatcagcattaatcttcaactcctcacttccctctgcgtctcctacaacaaccacccctggttttgccacatcaacatgcactgattctacaggggacgagttcacaatgacgtctcctttatcagttaactccacaccctcttcttcaataacattatcacttttatcgtcaacatcaacttttccacccaactcactctccccctcatcatctttttttgttccaacatcttcttcttccacatccttcactttactctcactctccccatctgtggaagcctgtttcacatcaacatcaacactcccattttcaatcttactctcaccatcgtctttaatatcctccacgtcctccttaaccttcttattctcctccacaacccctacaccatcagaaacagcctccggcttcggagataacgatgaaacatcatctacaccaattgtctcaccagaaaccacctcaggcttcggagtagcctcaggagtagtagaatcctcctttaaagaaccatccacctcgtcggaaaccttcccatcacccaccaaattcggcttctccttctcggagtcagataaatcatcagctccaaccttatccgaattaccagacacagcctccgatgaggaatccaactccttggcactactcacagcaccaccatcctccttatcggcggctgcagcagcagcggcggcgacaacagaagcataggtttttcctgataacaaaatatccttccgattaaaaccctattcccaaaaacgcagattaaagaagatataaacgagaaagaagaaaaacctgattgccccgaagaagcgtagaaggggttggttggttctggagtaaccgactttgagtccatttccgctttgctactgagactctttctccgccaaacttgtggaggaaggagatagcgatagatagatagggtttaaaggaatttacccttttttgtgtgaaggtttttatgattgagaatttggctgctctctctcttttgaagaagagagaattgggagagataaggtcactcggcgaacaaaaaatgactcttcgtttttcttctttgccttgggattttatcttctcagtttgtgttttgaggatgatgatgaaattaccgaattaccctcgcttctatgttggtgaagtttccaagagggctctcttttgtgctacgctttaaactgtgtcgcttcattggctcaagccaaaatatatagagtttctttttttatttgaggaagaagtacaataatcatttgtggttaaaatttgaaaaacattgtatcattttaaaaaacagtaatttttttgtcaagaattttcaatttttgttgagtaaatttagaatattttagtcactttttggaaagtatttactgtttaatattttgtttttattatgcacaattctccaaatgttaaaatcttccccaatggaaaatgttttgatgggctcactaaatctagggtttttgaactcatgagaattagggttttgttatatcttctctttactaaaaaccaaaaaaaccacacaacaacaaaataaaataaaacatttaaaataaaaaacgagataacattttgagatttgggttttataaagaagaaagaaatcttttttgtatctttgttgatcctccctacccgaaattgcttggccacaaacgattttctcaccattatctacgaattatcttggatttttgtataacacggattccatatattaggccgtgattttagttttcagatgggcttttataaggcctccccctaataatagcccgtatacatgattttattatcaattaaagacattcagatttcagatacaacaacccatactgcaaaagaatctgaccacatgccaaattttgtttttcgaattaaactcctaaactacacaaaacttgtgaatatgatctcagaactatactaactcaatgtgattttttcacattttgcatactaaaagtaaataattagttgaatgtgaaatcaggttaaaaaaaagttcttgaattaacacagattattgatccatgaagctacaaaatctcaagttctaatggattacaaagaacaaaaaggaagaaaaacaacattttgatttcgtaatagaactctagacgtagagacaaagtaaaaccaaagaattaactgatgtctctgcacaatactttatcatccatcttagtacaacaacaagcaaagacacaagacataaatatagcgagaaacataacacaaatcctaaacgcaaaaccgattcaaacttgattggtttgtaccttaaccgccttaaacgccggatgaagcaacccgagctcgtctttcatctccaacggattgctagtctcgttccgcactctcttgactttacgactagccaaagatttgtgagtgaaaccatagatttgcagaatctggttatctccaaagttaaaggctctgtccatttgttttagacaccgttccaccgggtaatcaccaaatttcccacacggtttgcaaccgacaaagtgagtcaccaatggccatctgtgatctcctagacccgggtggtagttttctatcatttcttcatatctgtccacaagaatcccccagtaaccgtgaagatagtatccactttctaggtacacctataacaacaatgcagtggctcaaatgagtagctcaacaaaatccaaaccaagcaaagatttgagtttacttcaataatagacccttacacagatgtcagaaaccacaagatgcaactcacattgtcatttttgatgatcaagagacatgataaaccacaaaaagcaactcacattgttatttttgatgttcaagagacatgataaaccacaacaagcaaaccacaagtttccaaatttagtttttttttttttccacatcaaaccaatgctgaaatggaatcaagttcatagttatataccagtcaaaatcagtttgtaccttattgccccaagcgtctcgctgagtagccaacagataaaccatagcagactgatcatcagcttcgaacaccggtctatccttgagctcacgggtcaaaaccttacccgcttcttcacggatcttccctttaggacccatgggagcccaagtatcaagcaaatcaagtgcccattgattgttcctaagcaagaaactccctgtattcaacccaatccaattcttctgatcataaaccatctcattccatccatgcatcaccagattgtaatctttatacctctcccatggaagctcaaaagccatatctgtaaacatagcatcactatccatccaccaaagaaactcaatctcaggatgtgacaacaaaagcttcctaatcaatggaagctttgcccaaaaaccagccatctctgcatcgagaagagccatgttgtagaagatctcgatcccatgtaacctacagtaatcgatcttgttcttgatcgatttcaagaggtaatgatcaccgacaggattctcacatggttttggcgccgaaccagtcaccaaaagaacacgtggcttgttaggtccgatgaaattagggaagctagggttcttagctaaccaatcagatctctgctcatcccaatctgatatcttgggtccgagagtgtaaggtttattcgggtcgggtttctcttcttcaccttcgtcaacgaaaatcttgttgatgtcaaacgtctcgtagttattactcccaccggaattacctccaccgtcaccggaagaagaatctcctccggtctgaatttcttcgaggacacggtgaggctcacctcgtttgcgtgcgtggaaatgttgacggatctcgtcaagatcttgctccggagttccgaatttaccggcgccgattgtgctacgtaggacaacaacggtaagaagaagacagagaatcgttacctttaattggcgtaaagctctttggattctccggcaccggtaagctcctaaacacctctcaatcatcttctttcttcttacaagattctctgtaaaagatctgtgctttatgtgtttttaagagaagatctgagtttccattaatgtaagagattcgaatttgataataacactgttaattaccaaagttacttactacaacaagagaagagaagcgaggagagtttttgtgtttttggacacgacagttaagattgtctgatttcacttaattgtcggtggtagtgatgagttagtagcgttgttgacacgtggcgaagttctagagcgtatcatttgcgatcaattatcttgaccgttgatgcagttatagatctatctataaaaaactaaaaatctaacagcgttgaaaagtcaactcgttgttttttttgtacaaactcgtttgtttatttatatatagaaaactagttgaaaagaaaaaggagcataaatagcataatattttaacttgtttgatatagttaaatacttaaattactaattagaggttaggaagttacccaaatgacttttggaattcattatattgtgatatggtttataaaaaatgttttttttccctcatcatgaaaagataccattattagtattacataagtactagattttaacttacggtgtaccgcggaaacaatttatttttaaagttagtatatataaaaatatcatttattttattaatgttgatcttatttatgatatgtttatgaatcatttgtttaaatattttagtcgatgcgggacattgaaccacatatttttcgtcaattggttaatatattttcatttttaaaatttcgaatcacggaaaaaattttgatttttttttaaactctatatattatataatgatgttaaaaaattgtgatatattaaactttttaaaagtttaaatattgataacgttttattaagtttaaatatagaaataattatatttaaaaagttaatattttttaccttttaggtaatgacataataaatctaaaagcaaggatttagaagatttagatctttaattaaatattttcattcctaaataattaagcatgacattgtaaataagttcaaatacatgatttatttatttaaacaaaaacgtttagtaagaataatatttatttaaataaaaaactttgttttaaaatattgttaacaaatatgtttatgctaattttaagggattgatgtgaagtttgtttggattaaatttgattgataatgtgattgacaatttaaattaagaatgtaaagtaaaattaattagtttgaaaaaaagatttaatgctaatggcattattgtaaataacttcaaatctaggatttatttggtaaaatggctccaaaaatgtatatgtagattacataatgaaaaaaatatctcataaaatatcagaaatcactatttatcattacatcatgaaaattataaaacaatcaaaaatcattaaccactaattacattacgaaaaagtttatatcatgaaaaacatcaaaccagtctcttaagggtatgcttatctcctattatactcatctgttaggccccctaatgatgatgtgacccccttctccgttgaacgaattcagtctcttcatccttttaggtgtgactcctccttggctactcagttaacagctattcctagtgatgaagagatcactatggccttattctctatgcctaggaacaaggcgcctggtccagacgggtttccagtggaattcttcttggaagcttggcctattgtaaaggaaagttttattgcagctattaaggaatttttcctgacaggtcatttgttgaaagggtttaatgccactgccattactcttattcctaaggttcccggggctgatcagctcaatctctttcgtccggtggcttgttgtaccacaatctacaaggtgattactcgccttatctctaagagactcaacctgttcattgatcaagcggttcaatccaaccaggttggatttattaaggggcggcttctctgtgaaaatgttctcttggcgtctgagctagtggacaacttccaagctgaaggtgatacttctagaggctgtcttcaggttgatctaaccaaggcttatgataacgtcaattgggagtttctcatcaatatcctcaaagccttgaatcttcctcccatttttataaattggatatgggtttgcatttctactccctcttatagcatcgcttataatggtgaattgattggcttcttcgtaggaaagaaaggcatccgccaaggagatcctatgtcctcccatctgtttgtgttagtaatggatattctggccagatctttggatttgggagcagtggagggccggtttgttctgcatcccaagtgtttggctcctatgatcactcatttgagttttgcagatgatattttggttttctgtgatgggtctctgtcttctcttgttgccatcctggatattctagacgtgtttaagaaaggttcgggccttggaattaatctgcagaagacggccttacttttagatggtggtaactttgaaaggaatcggattatggcagctagtcttggtgtttcacaaggttctctgcctgtccgttatttaggagtgcctcttatgtcccaaaaaatgaaaaagcacgattaccagcctcttgtggataggataaattcaaggttcacgtcttggactgcaaggcacctctcctttgctggtagattgcagctcttgaaatctgttatttactccacaatcaacttttgggcttcgatatttatcctccccaaccaatgccttcataagttagagcagatgtgcaacgcgttcttatggtccggagctccaaactcagctcgtgaagcaaaaatctcttgggatatagtgtgttcttctaaggagagtggtggattgggtttaaaaagattatcttcttggaataaggtccttgctctcaagctgatttggctgttgtttactgcttcgggttccttatgggtctcttgggtccggttgcatctactcggccgtaggaacttttgaaatcttaatccctatctttcgggcagctgggtttggaggaagctctgtaaacttagagaagttgctcgtccttttgttatttgcgaagttggttcaggaatcactgctaggttttggcaggataattggacaggtcatggaccgcttatacacttaacggggttgaccggtcctcagctggttgggctttccattacctctgttgtcagggacgccattaggaacgatgactggtggattgcctctagtagaagcaggaatccggttattcttcttctgaaatctcttcttcctcctgttgggaatttggttgattgtgagcatgatgactcttatctttggaaagtgggtgatcgagtgccttcttcaaagttttctacagcggatacttggagagctctccaacctttttctgtctcagtctcttggcacaaggcagtttggtttacaaatcaggttcctaagcatgctttcatctcatgggtaactgcttggaacaggttacacactcgggacaggttaagaagttgggggctcattgttcctgctgagtgtgttctgtgtaacttggtcgatgaaactcgggaccatctcttctttgcttgtaggttcagctcaagaatttggaccttctttatgagggcggttggattttagccgcctcctcagttcatgaattgcttgctgtggcttaattcggctacaagggacaagaatctaatgctcattatcaagcttctcttccaagcttctgtctactttatttggaaagagcgtaatgctcgtattcactctgaaatcaggcggccttctcatcttatcactaaggaaattcagatggtgataagggctcggttggatcctctctctcgctcccgcgctcctgggagatccggactctcgcttttgggttcttggttttctctcttcctcaatagagatcctcctcaagtctgatgctttctccttgtgcaggtttcaaaggttcgggctttggtgttctagctccttggccgtctgctgtgatggcttgggccttctgggcttctgcctttgatctagccttttaagctt

SEQ ID NO: 516 - DNA, 98527 bp, Arabidopsis thaliana
aagcttgattcaaagggaaagccttgttgataaaccagtaagcgtctctgaagctcacaggatccgaaacccagctcgtctcgaaaagctgaaacaaacaattgcaagccagagaaatgggggaaaaccaagtaaatcatcacatacaaagaaacaaagcgaaatgaaaagatcagatcctgaaaaaaggaacatataagacagcttccatagagaaattcacctttaaaaagaggtccttttgatagtgattggtgaagaatctaaagacgattcgcttcagatcatacagagagagaaagaggaagctctagaaatgatttttatcttcactagcggatgagtgatgtgtaaaagaatatcttctagggtttttaagcctccatggaaatgaagatcctacggatctgagaaatgagcttgatagagacgaaggagagagagagaacagagcagttgtctttaagtaggcacagttacttcatgagtctgctgaattgaaattacattaataccctttactatattcagttaccattttgtccttcacgttctttacttgagcagagtaataataattaaactattttataaacaaagcaattaaggatcacttaagcgtcttgctcataaattaatttaattatcattcgtttcgtgcatgagaagaggacctttacatgacatttctttgataatttttttgtttttaaatactatttttaagctttgaatagtaatacgaaaatgctaatctcctctaaattgaacagatgtcgttttctttgtcattcaattcttaaccaaaatcattttgcttctttgaatgatttatatgttattatttatgaaacgaataatagattatggactaggtacttggtagggtcttctattgagatagtgcatttattgagaacagattcagacattgtatagttccacaaaagtggaatcataaactataattggaacccttgcaggtaatttaccaataatatgatctgcctgcaaattcggatattattgcaaattttatctgcctccaaattccgaaattattgcacttcacaattatagagatccccaataatatatataagtacttgttttgtttcacagttctaaaaatagaatgatgataataatggtgacaatgataacattgatgatgatatgactggattcttaacagacaaacgcaatgatatgaatacagagggaggaatgcataatctgtgaagctcattaaaggacattattcgaaaatacagtggtgggctcaaagcggatatcctaaataattgattgttctacaatctcagaactaagtgaatgccctgcaaaattcaatcatcgaacatgacctaaggtaaatgcacaagaacggttgcagatcctcagtgtcagaatctattatctttgacacacaaacacaatcatgtgatacatagcagattaacgcataaactatgaagctcattaacggatacatagcagattaaagcataaactacgaagctcattaacgggcaagtagcaaacagcagtatctatgatgcaaataaggaacattcaacaagataaagcataagatgagtacccacataacagaagcaggaagccaagcaaaatcaatcatcatcttcttcagtctttccagcaccgaaagggtcatgatttggccccacctcttctcccatatggcgctgcacaagccgctgcagatcagacataaccttagcctcgcgcttcgccttctcctcgtagttaaacatggccaatgcccgtttgtcttcagcactgtaaacctggttttcttttctaatacgaatagcattcatcctttgatgcctacttccactcatcacataaccaagatcctcaaacttctgaatctcttcagcgttaagacccacttctcctctacgtgggatacgtttaccttgctgaacatactgtgcaatggcgtctccttcaccgggtcttaaagcaccaccataactgatgtgaccttcagctttaggtaatggcattggaccaacatcaccttcttcttcctcttcatcaacagctgaagatttcttctttaattcaatcatctctttgaacttcttcaactcttcttcatcaagttctagctcagtgttcttcaccgtttcgtctacttgcatcttcgaatcttcctcagtaccatcgctgtcactccctgacttcgtcttctctcccttgcttcgttttgaactagaatccgaagatttcttccgcctcttgctctttgacttggtatcttcttcctccccagacgaagaagcactaatctcagctttactatcttcatcgctgctctcatcagagtcactgtatttcgtctttctcctatgacttcgctttttcctaaaactacggctgcttctactcttcttcctcttagaagaactcttcctccttcgtctcctatcttcctcttccgaatcactctcactcccttcggattcactatcgctgtcataagatctctttctcctgcgcttagacctcgagctcttactcttcctcttcctagatctcaaaccatcagattcagattccgagtcagatttacctttcctttctttccctttcgaattatcatctctttcgccgccgttcttgtcctgaatctcgtcggcgttctcatcggaatcctcgttctgatctctaggtggactcggtgtgttctcccaaaagcagaacttggctgatttcctcatcttaagccgtttctgcctcctatactcttcgtgactcaatcccttcaattcttcatcggaatctgaaccagatcgtcttccgtttcgataatctcgatccaaatagccatgattcttcccaaatctcctcggaagcgagttcatcgtcattctcgaatccctaattcactccgacgacgacaatgaagaaaacaaaatctaagcagctgtctgataaattagggctttgattcatatacagtatctgcgcctttttacttattgggcccttaacgaataggcccaatatttatcattattcaccactgaaaatcatgttttgattttacacaaagcaccccacattttaattagagtcaatcgagtcctctatccttatcgtcgtcttcagatggcaagtctctccatgtccgccgtgtctctgtcgccgtttcggcctcaaacagagaatcttctttcaaaactcagtttccgaacgaacttacactcgttcaatctcaaaccaataaggattagtacgaaagttagaagttttggtgggaatcggagagagccgaaggattcaagatttgtcgatgaaaaaggcgtagttgatgacatggaaggtttcttagacaatctctctctcgaatacgactctgtttgggacactaaaccctcttggtaaatctcatttaagttcccaacaattttatttcaagtagtttggatttggtcctaagacttatgaggaatcgtatttgttggttgtgaatatgggattatagcttagatagagtcttaagttcacttttaagtggaccaatccttaatctttattagcattttcagtgatttatgcctgcccaagaacttttttgaatcatatatgaagctatatatttattgatgctacttaaaacaagacttaccccattacagtttcatgattgtgtgttgtggtttagaagatagaaagaaaaagtttgaatcttttggttaggaagatagtgaagaaccaaaatacagattatgtaatggtaattgggttaagaagggtttaacatttcgacctcagcatctacagctttgaatatctattgatctggtgtgtatttgcaatcaagaactttacggttcttcttagacgttttcagggcctagtgttcttccgtatggttttgaataagcaactggctatgtttctcaggtgtcagccatggacgataatgttaacgggtctatcaatagtggcatgtagctgggtaatactacactcggtcatagtttcatcgcttgcggttggtgtaattggtgcttggtggtacatattcctttatagctacccaaaggtatgattttcccttccatcatctaacaacctctccttttcattcccttactaaagaaatgttcgtagctctaatttactaagtctaagttaaagtaaaaatcctgtttaaacatcttcagacaatgctagtttctataatcttagtgaacaagactttactttggtcttgtctttgagattctggtggttttttcgtgtactttggttcagtcgtattcagaaatgattgctgaaagaaggaaacgagtagctgatggttttgaagatatttacggcaaaaacaagccttcataggatcttctcaatgttcaaaattacattcgtttcttgcataaatcttcccttctgttgtgtgtataatataaccatcatctatggatttatctcaatttcattcacagatgtttggatacataaatcttgatttcagagtcctctaatgtagtgggcattaaaatcgaattgaaccgattatacaaaccgaaattaacccaaatataccgaaacctcattactgaaaccaaccgaataaagtgccttcgaactaaataaaccaaacgaaccggaccaattttagttcaacaaaatcgacaaattcaaatcgaaccgaaccgagccgaagaaccaccaatacgagaaatgaggaatgaagggtaaaaatgtaattcccaagaggtcatggtcaacggaatgtatatatatgtaacggtgagagattcattgagatcatctccactctgctaaatccgacgagagacgacgatgccaagcggtggtaacggaacaagtaacggagtcgctaacgcgaattccaccggtaacgcaggaacaagcggaaacgttccgatatataagccataccgtcacctgaaaaccctagaaggtcacacggcggcgatctcttgcgtcaaattctccaacgacggcaatcttctcgcttccgcttccgtagacaaaaccatgatcctctggtcagcaacaaactactctctcattcatcgttacgaaggtcactctagtggtatctccgatctagcttggtcttctgattcgcattacacttgctctgcttctgatgattgtacgcttcgaatctgggacgctagatctccttatgaatgtcttaaggttcttagaggtcatacgaatttcgtcttctgtgttaatttcaatcctccttcgaatttgattgtgtctggatcgttcgatgagacgattcgtatttgggaggttaagactgggaagtgtgttaggatgattaaagctcattcgatgccgatttcgagtgtgcattttaatagagatggatcgttgattgtttcggcaagtcatgatggttcttgtaagatttgggatgctaaagaaggaacttgcttgaagactcttattgatgataaatctccggctgtttctttcgctaagttctcgcccaatggcaagtttatactcgttgctactctcgatagtactctcgtaagttcaaacttcttcttggcttaataatgaattgaagaatgtagaaatatttaggtttcgaatttgcatcatgtgtgatttgggatatgaacaagaagttaagagttagtctttgatgttgttgatcttggtaacattttgatacagaacatatatagtaactatgaagaagaaataaagtgttgaactttcgtatagtcttggatgggttcttgcatttgtgttatcttgtcgatcttgagatcatattgatgtagaagatgagactaaatggattgattttatctttgtgtattttaacagaagctgtcgaactatgcgacggggaagtttttgaaagtgtatacaggacatactaacaaagtgttctgtatcacatcggcgttttctgtaacgaatgggaagtacattgtgagtggatcagaggataattgtgtgtatctgtgggatcttcaagcgagaaatatactgcagagactagaaggccacacagacgcagtgatctcagtgagttgccatccggttcagaacgagatatcttcatcgggtaatcatttggataaaactatcaggatttggaaacaggatgcttgaaaaacatgaatatatgtgtatggaattaatggtaacaacaatagttgagattgtgaatctgtttgatctgaacacactattttgatgtttcggaatgggatgaaatctcttgcaagttggtgttaatatttatgacagagatatcatctatgttctctccccaatatgtggatgatacttactttaaaactaaagctttttaataagagctactaaactaattaaatcgtcaaactaaaaacagatgtggatattgttttcaagaaaagaccattatcccaaaacgtagctgttagatacagatactcagcatgaaggaaatgatttggcctctaggattagacaataatgcagaaaagagatatttgtgtggaagagttataccgagccttaaccccgagatcagaatccatgagctaaaaactatgttttttactcggcatggtcacttggcttaaaaatggagagaaaattcaaaaaaaaaattatgatgcatgttacaaaacagagaagatcaaccaacagatgggatttttatggcttgcaagtacttctctaaccttttctcctcttgaggatgagagtgaggaggggattttcaaaggtctagagcctagagcgaagactgagcggagtgggtttatagtggacctttgttgagaaaactatcaagaagttggggtttgcagaaagatggatcaaatggagttgtttatgctttgtctctgatgaatcaaatcctctccaaaattaccagtttgaatcaggacaaagggtgaatctctcaaagtccatcatcacatttgaacattcactttctaaggatatatagaaggataattaacgtttaagaagaatttaacacaactttgtttggaaaccatgcacaccatcttttgcttacgagaagcattattaaagcacaacaagaagatggatatactgatgagtgggcatatatacagactcatagagtggtttgtagctagctagagattcaaaagataatttttcatgatgctaaaacaaccacgaccatatcaggctatatagccaatccacgtaattagtttaaagcatgcatattattgagatatcaaaatgttttaagccacagtaaaataaaggaagccccaccatgtaaaagttttaccttgagaacagttatctaagaacagatgctctatcaagcaacagtttctcgcaagtaactctaatatcggctctaacaaaacattcctgacaaagaaaaaaaagaagataatgttcccaaagaattcaatagaagatgcatctctataaagaaataaatggcaaaaaaaaatggacatttcatgaaatttaaacatgcatacaaggaatatagctaataagaaaaagtaggcactctaacttacactccaacaatcttcaaatcggttagattcgagcaggctgacaatggatccaaaaaggaattcatgttcatgaatccaagagagtaaatgtgtagacttgtcaaaagattcctagttgaatggagaagacaaaataccaaagaaacatgctgtaagagttaaaacataaaaggcactaaatatattgatgatcaagccaacaatctatatatacccggtaagttttagtggatcaaaacaagatcttgtaaacaaagatccaagaccaggaggatcacgaccaagtttaagggctcttctcgcattattcccataaagtattagtggaggaagacaagaacttctaaacaaacatccgggagcatcaacacgaccaagtttaagggatctaaacgcaaccaaaccaatgagagatggttacatatactaattaacaaagcattgtcgaagatatataagaaagtgcaagccaatatatgtgaaataacctgagttgttttccagaacgattaagcaaagtacgcaaaacgcggtcatcaacatgtttaaatgcttttgtcaaatcaatatgaaagtaacataaagggtccatggcacaattattgaacattgtgcagcatgcagaagcttgcattagggattttgtatcaaccatcgaaaatacctgattatgatgaatccatgagacatgtgactaggaccaatataattaagagaaatctatattgatttgttaccttaacggtgagttccgaagggaggaaccaggagatggaattgtgaagtgtggctcgtttctgggagcaacgtttggtggattggagaagaagcgagaagcgctcgagagtacgatctacgagttggtcttggacggagacatcaccagaggagagaagatgatcaagtactcgatcgaaagaggagcttatggagagagatggagaatccggaaatgtaaccaaggaggagattattgaatccaagtgcctttcattgaattctagagaatcagataggggactagagttagggttttcggtggacaacatttcaaaggcttttgttttgcaataatcagattttccaactattttatttatacttacccattaaaaaagtggggtcctgtaataaactacataagattactttctatgtatgttcaccaaaaaaaaagatttctttctatgtattatacaaagtttctcaaaattatgcataaattttttcaaatttggatagtaattttttatatcctaattaattactgtcaatccatatctatcgttacaagatatttacccaaattaaacatgtccacgaaatcttttgatctgaatttataatcaaactcaaacaatatgatgattaagattaagaaataacctctttatgatcactcttaaaagttagatctctcatttgattttgttattggtagaaatgtgtttagtagtattgagtttgtcttgaacaacgtcattcacttgatgacaatctgattccatatgtttagttctcttacgaaatatcagatttgcagttatatggtattattgaacattgagtaggatcttaagtggtatatagaatatgagcctctccactcattgccaattgattttgagtggagatgcttatatcttatatatatcacttagatcctactcaagtttcaatgtgggacaatatccctaatacttacattttcataagtgtgaacttattttttctgttaagccatcccagaggaggttaaagtcgtcaatcaaatcctcaaatattaccagcttgaattaggacagaaggtgaatctgtcaaagtcaagcatcacatttggacattcaatttctgaggataagagaacagttctactaagtggccttaagccctcgcccaacttacactctatgtcttcttttaagatctccactaccaattttcagaagatcactgctctgatggcatagttttggtggagacctcaagacattgggaaaggaaaacaatggaatttgaggacaagatcactttaactaaggcagaacattgttttaggatttaaaaggacttaacaaatctttacgtaaaaacagcaaaataaatatgtccacgaaattttttagttgaatttacaaccaaaaccactaaatttgatagtgattattattcaatattcatctagatttagctaaaaaaaacagatttggctacaattgtaacaactgatctttcttctttcagcttcattaaaagtatacctatctggatatgaattgaagaatttagaaatattgttgtaaataatcatttaggttttgaatttgcatcttgtttgattttgggatatgaacaagaaattaagaatcaacctttcttctagtctttgatggattcttgcattttgtgtatcttgagaacattttgatgcataacaaatatagaaactgggacatgaaaaagaaatgtgtttgatgagttcatgcatttgtgttatttgttgatcttgagaacatttgaatcagaacaaatatataatatgtgactaatggatactcttgtagctcttgactaatggattgattcatctttgtatttggatcaagaatttaacagaagttgtcgaactatgcgataatgcgataggagtttctaaaagtgtaaaaccaatgaaaaaaagaaagaaactctctgatatctttcaagaaaaaactattatcgccgtccattttacagactagtcacatgcatctcaactcttccatggacacaaaatagtattgccactttactgaaagatggagacaaactataaaactctttcatgttgtaaaaaaatagagaagataaaacaacataattcactacctcattgataaagatatcaatctgaagagatataagaaagaggagacgggtgtaatggactgcaagtacttctctaactttttatccactaagattgtgagtgcccagatgagagtgatgtttgggattttgagaggtctagagcctgaagaggcgaccgagaagaatgatcaactgatcaaaccagtctccatatcagagatgaaggcagtgtttgagatggctcatgcactagaccagatgttatgaccgagagttctttttctgataatattttggtagctctccatgctctactgcatacaaaggtcacattgcctcaaatcaaatcggaatgataaacggttatgacaggttataatgggggacctttgttgagaaaatatgaagaagttggggcatgcagaaagatggatccaatggattatgtttcatataacctatgtctcttatggattgctcattagtggccaactttttggtgatatttgtcctatcaccttcatcagcgtgacattatatttttctatcaaaccatctaagaagaggttaattaaagttgtcaatcatatctttcaagattaccggcttgaatcaggacggagggagaatctctcaaaggattatgtttaagaagaatttaatacatctttatatggaaaccatgcacaccatcttttgctttgagaagcattattaaagcacatgacttagctagatggagccaaactcatagagtggtttgaatctgaagattgttccgagataagagaccaggctctagctaggtagagattcaaaagatgatattctatagtgcttcatatcaataaaaaattattctggttttttcaaataatataactgattaaaacttatccataaactcgcccaaaagcgtttgtcgtttgagttgatcttgaacaaattcatcattagaggagagaagatgatcaagtactcgaaggaggagcttatggagagagatggagaatccagaaatgtaaccaaggaggagattatcgaatccaagtggctttgattgaaatctggagaatcagataagggactagggttagggtttttggtgggcaacattgcaaatgcttttatttttgcaataatcagatatactaacccataataaaagtagggccatgtaataaattacataaaattactttcgatataattaagtattatacaaagtttttcaaaactattaaaatttggataataattttagatatcctaattacttccagccaatccatatccgttgttaaacaaatgaagagagaagaaatatcaaaagaataagaaaaacttaaggaagccatacctcggcgttagccaagttataagctaggacaggaggaaacaacgcctcaacggttgaacgttcgagaggtgcacctacgtggggtggaggtatatggtccttatgggtgtcaattgacctctcgaacattggtaataacgttggtacgaaattccaaacaccaagcatggacaagaacctctcgaacgttggtcttggtagagccttggtgaagtcatgaagagatcagtgacttggttattggtaaaaatgtgtttggtagttataagtttttcttgaacagtatcgcgcacttgatgacaatcccattccatgggttaaaaaaaagcaagttaaaatctgcccaagaaatcttttgatctgaatttacaaccaaaaccactaaatttgatacaaattattatgtttctagatttagctaaaaacaaacagatttggctacaattgtgacatctgatctttgttctttcagcttcgttataatatacctacatccaaacacacacatgcacacacaaacaattgtgtcattagtaggcatatatagttgtgttattataaatggtacaatatataaaaaaaaaaaagaaactaaaacaatctacttactttcctatgataatttccctacccccatcagcaacttcacttgttacgtcctactagagaaaatcaaggaagatattatgacttgtgagtgaggtcatttgcaaaaacaaatcaagtttaaaagcaaggtaacttttgggtcatacaattttaaaaaagtagtgaaatatataaaagactagcatacacatagttgaaaagaaaaaacatatcaacttacaatatgtcgaatgaatttgaagtgtccattgagaagtgaatccaaaaaataccctatttctctctggatatcgacatacattttcagaaacattaggagtacaagatgcaaaattgaaacttagtgtgttttatacttaccctatctagacaatgacagtcacgcaatattagagtcttgattggactgtctctgccgatagttctcaaatccctgatcgagcatcacaatagtttgctaaagaataataagaaactacttaagatattgtaattaatgtttgatcgttcaccacaaacctcaaaaaccgaccactaattccaggcgttctagtcagattcatgtatgtaagcttaggaaaaccctgcaaaaacatttaaatgttttagtggtaccaagtgaagtaaaagagaaagaaatactaaaaggaagctatacctccgcaagatttctgactgtttcttcctttagtccaaaacctacgagctttagcgtagttaagctggggcaggaggtaacaaatgcctcaacggttgaagaagatacacctgtcacatattggttgagcttgagccaaccagggaggaagtagagaggaaagtttcacagtggaaaaagtttacctgatgcaggaattaagtcgatattgttctgtaagattaaacgttctattatcaagcgaggatttttagtgagcgtctttagtacttgctctagaatttttttcctgtcacttgaaacatcaaataatggaaacaaaaaaaagagtgttaagttgtagaattgagattgagaattcatgaaactaaaaagctacatgtaggctccacgaaacaacttacaaattagcaatcatgagatcagtgagatttggacagactgataacaaagcgcataaggacttggttcctgtcgatacgattgtaaagttgtaggcttctcaagagaccactagttgaatggagaaaagacaaataataccaatgagaagatcaaatttggacaatcagattcaaacaatatcacttggtaatcaagaaaaatacccatgattacgaattactgaggtaagacaagtgcttgtgaacgaagatcctttgcgtgaagatataacacgaccgagtttaagggatctgcatgcacaaaagaaaccgcatgcaagagataatcacacaaaacacaaaattcaaacaaaaaagaaagcagagagaagattctaattaatgcaacaagattacacacctgagttctgttccagctttgtgaatcatactacacacaatttcatcaaaaatgcgtttgccacccattttcaagtcaatgtgagagtaacataaagggtctatagaacatttgcggaacatggtgcaacatgctgaagcttgcatcagagactttgtatcaagccccgaaaacacctgattttgtaaatacaatacgtgagacttatcactcaagaaatcatatcctcaagtaaataagacaacatctcctgtccaaacacaagactctagttctcttcatctacccccaaaacagaacacagatctttagattgcatctaaaacattgtagtaattgtagaatcgatcaattgcctcccaagaaaaaaaagagagccctaaagcaacgtagaaaattcattaccttaatggtgagttcatcagggagggaccaagaattgtaattgtagtgagtagcgcgcattcgagagaatcgtttggtggattcaagaagaagaaatgcgagtttgccagtacgatcgatgagacgatccctgacggaatcatcaccggaagctttggaagcagagtcgagaacttgaccttgcactctatcgaaagagcaaccaatagaattatatggcgaatcaggcaacaaaagaaaagaggagatagtcgaatcaaagtcattctggttgaaatctggagctatagtaacagaattaggtctttggatcgaggagaaagcatcacagcactgtcgcttagggtttggagtatccataacgtttttggaaacgaattcgggacgtgttgcagagtaatttatatgtggtcttgcttttaattttctggattaataattgctaaaagtacttttataattggaacaaaaccacaacgtcacatttttcaaattcgtttaatgatatggtatgtttgtatttcccaataagaaggaaagaaacaaagaacttccctttggactagactagttcaataagaaatactaacgattaccaaacactaatcacaacaaataatcgacatcaaatcccattcccatgtcatcatcattttctgactcatcttcatccgatacatcgtcagtgtcgtcatccgagtcatcttcttcgtccacttcatcgtcctcagcttccatcatctctatcagcctcagctcttcttcatcgcacacaccataacgctttcctgaactgaaattttttgcagacacaaaccccatcgttaaattcaatgactttaatagcttcaaacaaatgttaattttaaaaagtctatatagtaagggataaccaagaagaccttgttgatggaaaatccgccacaaatgtgacatctgatctttcttctttcagcctctccagaggaaagctacaattttatggaatatataaccaagtgagccgttagctcgattacaatgctaagtatctaaataagaaaatgaaggatcaatcggttactttggtttgttacatctcttgcccctgtctgaagaagctaatccactgttacttgaaacatcctattagagtaaaccaagaagaagacgattaagtgtaatccaagctatatctttcatttacagagtttgtcataattccgttagaacttacaatttgccgaatggatttgaagttccctgtgagtagtgagttacagaattccaatacttctttctgaaatatcgaggtcagtgagtgtcagaccaagactctgatgaaacaactaaaaaacttgtttatgcttttagtctcttacctcctgtagttttgggcagctgcgcaatattagagtcttgagtagattttctttgcagctaagtcccaactccctaccaacaatatttccttgctatgtgagtgagattttgctttataaaatgacttctagcggaaattttacttttaacattttggtgtctttacctcaaaaaacgacccttgattgtaggtgatcgggacaaattcaggtacttcagtttacgacaactctgcaaataacatccagttatgtttttgccattgtaaaagcatagattagatgaagagagaagaattaccagaaagataaaaaaaggagtcatacctcagcaagatttcgggcccagtcatcggttagtccaaaacgtatgagcgtcagggacgttaagttggggcaattggtcacaaactctactaaggatgatcctgctttactctctaacgtacctgtcacacaataggtgagcttgaggatacttggaagtaacaaaaaggaaagcttcacagtggaaaagctttacgtggataaccgtaggtctctaagaacaggtgctctattaagcggcatttttttgtcaatgaattaaatagctcctcggttaagttatacctgtcacatgaaacacgaaataacgtaaaacaggagacaatgttgcttaacgaattagcagaactgaaagtcgacagacattgaagtagtaacaacccgaaagcatagaagatgacaatatgaaacctctggacaaagggagaaaaaaaggagaaattcttgaaattcataacagacaagcaggcactcaaagacaacttacaatcccacaatcctcagatcagtgatatttggacaaactgacaacgcatcgcataaggacctgtattttataggtctgagattgtaaagccgtaggcttctcaagcgactcctagttcaatgaagaaacaaaataccaagttagaagattaagtgcacatgaaatagacaacaatttctcagagaagccttaatagtgatagagattttgaatcactttcaaatggataatcaaagggaatagacaatatttcaggatataaataataggttttttcttttaattggtctcatgcttgattcttggtttcaaattttattttccacctaaggcatcagccataaacaatgagttttagaaataagagagcctgataaaattgtaaggcatgtttttcctgatctagatctttcctatctataaaaactataaccttaattccacatgttcgtttatcaaccttatctcctttagctaagtttagacaggacaagacaagtaaacaggtaacgaatccaatacccaagaaaaccatgattatatgctagtggggaaagacaagatccgctaagcaaaggtgcagcagaatcagatccagctgtacgaacaacacgaccaagtttcagggatctgcatgcataaacgaaaccctgattatataattcaagttcaaatatagaaagcaaaaaaaagctaagagatatatgcagattgttcttcaatctcattgaactcagtaggttttataccagcaattagaaatataaaatcacattggttggttgtttgaagacacaaaaattcacctgagttctttaccagcccgattgatcatagtagacacaactcctttatcagcatatctagcagacgttgtcaggtcgatgtgggagtaacataaacggtccattgcacatttattgaacatggtgcagcacacagctgcttgcatcatagactttgtatcaagcatcgaaaagacctgaataatcaaattaaacagagtaacatgagaaaccactaaagatgacatatcctaaaattccaactcttcctaaaattgaacacaaatcacaatggattcaacaacgcaaatgtgtcaagttttcacgaacaaagcataatttgagaatcatcaacatcatcgcctctagattcaataaagtttcgagaaattttccgatttggttgttaccttaatggtaagttctggagggagggaccaggaattggaattgtgaacagaagctcgcttacggaagcaacgcctagtggaatcgagaagaagcgacgcgagttcgagagtacgatcgacgagacgatcctgaacggattcatcagcggaagcggaggcgagagctctatcaaggactcgatcgaaggaattgctaatggagatcggagaggaatctggaaacgaaaggaacgatgagataatcaaatcggtgtggctatgattcgagcctggaacagtacggaccgagttatggctttgggtgggaggatccatggaaccaacccaacgttgaatacgtcttctcaagcgttttctcgagtgttgtttataaatggctccgcctccaaggtccaaacttccgggttcgttttttatttttttcatttcttttcaaattatgtggattttctgtagggatatttatgtactaaaaacaacattatagtttttcaatttggcatgtttaagttaacaaattaattcttccaatgtgtgttgattacgtataattggtcaatggttagattgaatcaaagatgaaatggaatcatcattcaccagtagtctccacaagaacatgaaccatccttaaaatggtgaaacctgttattatccctcaagataatcagtctccctgtgattctggccatatacttgatggcgttgtgacaatcctcacatacacgcagattctttatcacacggatcggtctccctgaagacacacgcattatcccataagctacagccagtctctcgctatggtaccgaaccatacgctccttctcttcttcctccacatcatgaagaaccacactcgtctttgaaacataccctgctttcttcattctcaaatccagctcctccaaaaatgcaaagatctcgtctttctcaggatgaaactcatccccaaccgagaaagtatgagtcttgttctgaatttcaatccaactgtaccctggaactttcttcacccctttatcccgcattctcactcgtagtttaccaacatctccccatcgacccgaagaagcgtatagattagagagaagaacatacataccggaattttcaggctccattgcaaatatcttatctgcagctgtttcggctagctctgtgtttccatgaactctgcttgcaccaagtaaagttccccaaattgcagcgtctggctcaaagggcatgttcttcattagattgtgagcatcttctagaagcccagctcgaccaagaagatcaaccatgcaagcatagtgctgtgagttaggcattacgccatagtcttgagtcatcgtatagaaatattgcctgcctttgtcaacaagtcctgtgtgactgcatgcagataataccgcaaccatggtagcatcatctggcttcagtccttctctcttcatcgactcgaagaaccttaaagccacttctccgaacccgtgccttgagtaacctgcaatcattgtgttccaagagacaatgtccttcccagccatctccttaaacaagtcattagcttcttctatgcttccacatttgcaatacatcaacaaaagcgcattcccaacaaagcacccagtctcatacccacctttaactaatcgtccatgcaattgcttcccgagctcgagagcaacaacgtctgcacatgtgcttagagcagatgaaaacgaagaccgattcaatctacctccctccctctccatttgtacaaacaaacgaagagcttcaaagctgtgtccgctttgcgaataccctgcaatcatagctgcccaagagaccggatctctctttggcattttatcaaaaaggttcttagcttcagaaattttcccacactgagcatatccagttatcatcgtgttccatgtactaacatttctacaaggcataacatcaaacaattcctttgccatctccattctctcgccctgcacatatcctgcaagcatggcattccatgacacttcgtttctctctggcattttgtcgaataattctctcgcttcttccaccatccggttttgtatatatcctgacaccattgctgtccatgtaaagacatcttgaacaggagactcatcaaatagctgccgcgcctcatcgattttcccgctctgtgcataaccagtgatgatcgtattccatgagaccacatccctcacattcatactatcaaaaaactgccttgcctcaacaatctttttcttcttaacaaacccaccaagcaagcagttccacgaaaccaacgcccaattctctcttgacttaaacaacatacaagcctcctccatcttactattctgaacataagcagagagcaatgcattccacgatacatcgttcttctcaggcattcgatcaaaaacactccttgcatcatcaacacaaccattctgagcgtaacccgacaacatggtattccacgaacaaacatctctctcaggcattatctcaaacaattccctcgctttcccaagattcctgttccgtacataccctttaatcatcacattccaggaaactaaatctcgttcaggcatttcatcgaacaacttccgggcgagttcaaactcaccgtttctcaaataaccagaaatcataccgttataagaaacggaactccacctaggcatgcgtttgaagacacgaagcgcttcgttgcatcttccagtacgcatgtagctgcttatagcaacgttccactcttttatatccgagtctccacatttaaggagaggtttggtctgcgatttctggatttgggtttgtgtagctctcttcaacgagtgaaaattagctgcaccgtgtgcgttgttgcatcttcgtttaagtccattcaaggatgtgtaatgtagctgctgagctcgccgcgaaagagcacgaaacttgtttatttccattactgaaatgaaaacattgtcaaaggatcgtctccgtggatttcacagaaagttttatcacaaacaaacaatgcataatctgagattttctcaaggtcgtatcaatttctcaatgatcattcagtcaatatctcgactgtaaggcataataaagatgaaggatctaattgtaattacttaagagttaaaacctactgtaaacactatatatatgttgtacttagagttaaatatctaattgtaattacttagagttaaatatctcgacgtctttaaaattattcattgtaattttaataaacaataaatataattaaaaaatatttgtcacggtcgctcatttgacagtgacgataaagaattaaagatggttccaagattctcccgacacaagaggttttacaggtaaggagaatcggttgtttttgcgtcttagaaacgggaagccaatgattataacttgtagggttggaatggttacggcggttgaggcgaacaaaaccatcgaaggatcagaccacattttatttaccattcattaattataatttgcagtagtctaaactaaaaaaatagaaaaaaaccgcagcgtaccatttgcgaaccgttattacatacaaataaacttggtctgcagcggtttattgtccacccaaaaataaaatggactaaacgactgacaaattagaccgttttgtccgctacatctattctaaaccatagtaactatagttctttccatgtagaaggaaggaggaaaagatagtttctccaagtaggaaataaatcaatgcctacttatattttcttcaggaaaatgaaatagattagaaagaagagaccattatcacaacttcaggagtcagtcacaacgtcagtcctcgtcttcttcttcctcagttccactttcgtcggaagattctccagagctgaatttcacaaacaacaacaaatcatttaaaacttcaattcctaataattaattttaaaagcctaataacaaattgatcaaccttgatgatgatgatgaatctgacgaagaagatgaatctgacgacgacgatggtgatggtgatctaacatctgattctgatggtgatggtgatctaaactctgccacaaaagtgagacctggtctttctttattcagctcttccagaggaaacctacaacacacaatttaagtggtcatataaaccgttacgttatttaaccgagttattatatgattactagtatttgtcaaatggtaacaatataaaaagaaaagtcagttactttggtttgctacatctcttgccgcttggatgctaacagaagagaaaataagccataaaaggaagcgaggaggaaaaatcagcattcatgaaaaattgtatcttcttctttgaatctcttgttgtcgctaggtttctctcatcgagagctagcgtattgatcatttggtgttttatgaacatcggattgattctatgggttacggattaaacaatccgagttgttttgaagtgaatcgggaacgttactgtaacaatccaatagcataactttactagagaagattagaaggagcgagacgaacaattcaagacgaacggagagaattgaaacagtatcgactttttggagacctctatgggtaccagagacaattatgggggcctttgaatttatacagagtccaagtcgttgtcatgctcctcctccgcgctgttataattagaagtccacgaagaggtgccatctgaatatacctcccctgagctgagatattacaaagacatttgtttaaactcggattagtttagccgtttacgtactaaagcctaataaacacaactagttattgatgaaccttgatgatgacaatgatgactgtgattcaaagattgccacaaatgtgacatttgatctttgctttttcagctcctcgataggaaatctacagcaaacaacagtgtcacatataaatatgaacatatcattgacaaacaaaaacttcaacaaatcagtcagttagttaccttggttcaaaagttctattgcctccatcacatactaaaccgtcgacgtttgatacgtcctaaagaggcatttataagattaaaaaacgtcacttgcatcatacgctaatttccaggaaaaaaactagcatataatttcctttaggaacttacaatgagccgaatgtatttgaagtctccggcgagtaatgagttcaagaacagtaaaacttcgctctgaatcccaaggtgcggtcaaaactcacgactgtgactttaagaatgaagaacaaaacttaaaacttgttgtgttttatatcatttacctcctttaggatatagcagtcacgcaatatcagagtctccaatggactatctttgccgcaaagttccaaacccctaccaacaaaaccttaggccataaatagtttgctaccaaagacttacagatatcaccattaacatttactcaaacgacactaacctgaaaaagcaaccactaatttcaggcgaactcgacagattaatgtgcttcagtcgacgaaaaccctgcaaaacatcacaattttatttcggttttgtaaaatgtattagatgataccaaatgaaaagaaaagaaataacaacaaaactagaggagccataccttaattaatttttgtaatattgcgtcatttagcagaaaacctaggagcgatatcgaacttaagttggggcaattggccgcaaactctaacaagcttgaatctgttataaggcctatactaccagtcaaaaagtaggtaaccttgagcaaacactcagatgaaaaatacaaagaggaaatcttcatagcagaaatatttacctgctgcaccatatatctctatgaacaggtgctctatcaagcgacaatttctcgtgagtaaacctaactgctcaagtggattatccctgcttcctgaaatactaaataatgcaaaaaaaagtaattaccataaggaatcagcagaatttaaagtgaacaggcattcaagttacaaaaacagttaaaagcatagacggaggcgcctccaggcaaagtaaagtaaagcaataatgaattggagaattcctgaatgatccaaaacagcttacagtccaacaatcttcaaatcagtgagatttaaacaagctgacaacacaggagataaggacccgcaatctatcattctgagatggtaaaggtgtaggcttctcaaatgacccctagttgaatggaaaaagatagtatcactcagaagatgaaatacagatgttaatttgaacaccaactattcaagtaacaaaactggtaaacccagtttctctatctagttgtttcagagagcacaaatcgcattaatgtaacaggtttggtacataaattttcacacgtatatatttgataatcaagcaaatacccagtaaaaccatggttaaaagttagtggagtaagacaggatcttgtcagcaaagatgtagtaggttcagctgaggaagaaatagaaccaagtttgagggatctgcaagcataaaacgaaacctgagagatgattacatagatacctagaccaaggtccaccaaaataagataacccggaaagagaaaatcttacctgagttcttttccagcccgatggatcattacgcacacaactccattatcaacatcttcggcagccgttgtcaggtcgatgtgggagtaacatacacgatccatggcacacttgttgaacattgtgcaacacgcagaagcttgcatgagagacttcgtatcaagcattgaaaagacctgaatatgcattagaaacatattatgtgagacatcactcaagaaaacgcatgccatgaacaaaatatcatttgagcattcgtaatttataacatccaatatgagatcaggcgggaaaacacagtcctaaaacattgtctacagattcaacaaagcgggtagagaaacatggcaaaaattccaggagtagatatacatgatatgagaatgctggaattgttaccttaatagttagttcagggaggagaggccaggatgtggaattttggagggtggcacgtttccttatgcaacgtttggtggacttgtatagaagcgatgcgagttggagagtacgatccaagaaacgatcctgatcaaattcatcacgggaagttccagctattgaggggatgacattatcaagcactcgatcaaaagagcatccaatggagagcggtaaggagaacaaaggcaagtccgacaacgaaaggaaagaagagatagtcaaatcgatgttgctttggttgaaatctggagcaatagggagggagcaagggttttctatggaggaggtacccaaaggcacaagacaaggtcgcttgggattgggagcgtccatgacacgaatgtcaaaaaggagtttctttgaaaggagagaatgcaagaaaaaacaaatttatccaaaggctcaaaattatgtccgagctttcatgtagaacatgtctcgctttcactataaatctgcaacaaattattcatcccggaagctaaatctacaaacaccagaatgataaaaaaaacatttcagtgtcaccattcgcaccggaagactagtgtttgcacaaaaggataaaaattgagaagtgattgatatcggcagacaggcaaaagatatctactgaatagaaagaaaaaaaacttaactattatctcagagtcagtcaggtattggtcacaaactttgcaaagcctggatctgataaatggttgttctttaactgtcatatataagggatgcattcaaaataaggatacttacaagttacaagtctcaactacacgaaactctagctaaaccaagtgcattcctagctacaaatcctagaacgcacaagctcgctataaaccttgtatccaacaaactttgtctattccatgtgggagtagcataaacagtctatgacataaacactcgaaaatatgtgatatcatcaagatagagttcagaattttcgtccaaaataagaaacaaggctcttaaacatagtcactatagattgaaaaaacgcacagaaaacggtagagaaatggtgccaaattccacaaacaatgcctttggttcgttttttgttttggaaaatctctattttacgcttcgatcatgctttaccaaatccaattgtgagagtgtataagtagcttacattcataatgagatcagccgaaatggaaattttgaacggtaacgcgattccacagcaccgttgccaaaatcgagaagacgtgagccgaattagtggatacgatcaaccaataagacgatcctgagttgaattatctccgtcgcgtgaaggaacactcagataatcagggcgatgtaataaacgttaattacaagaacaatcggaacctcactatggttttggatcggagactgggaaacgaaactgtcagtcctctttcgtggccatcgttcgatcaagtgtgcttctgcgaaagaggcagagacgatcggcgaatataagatccgaatcctttaaacccgaccgtttgaaattgaaccgttgggctacgataatgattttaactttcctttttctactcaaccggcccattaaagcccaacatatgccttccaaaattacgttatagtttaggcccataaaagatccattaaaccaaatggaacaacaaattatcaaaacaaaatccattaaaaattaacatgaaacatagtcataatcatcaccacatgcacatagtttttggtttttttagtttacagatcttacaaatcataactttgtttgccagtaaacttaacttcaatgggactaacatttttcccaatagatctcatgttgagaccaacaccttctcttcctggattcgccttctctggataaacaccatctttaggatgaagatattgaacctcaccgttaggaaacactctgtaaaactggtaagtgatcttgtacttggatctaagccttgtccccaaagctaaacactgctctttcctcgctagcttcagaagattcggaccttctctcatgatcgctgctcctcctgtcggcatctcaaagatctgttctttcggtgagttccacgtgataacgtagaactcttccacttgcgctttacgtagaagaccaccggtgcttccagcgaagatcggagacggtgtgtttgggtctagctgcggtggcgtgaatcccacgggagcttctttcgtggcgggggctgcagcagcggcggcggaggaatctgttttctcggcgcggattgcggttttggtgaaggagagggatttgggacggtgggttgttgagaaaaagtggagtttcttgacgccggaggttgcggcggttgttatggcggagttgaagatcccggcggcttgagttgccattgttttttttttctctgttctctaatgagcaaattgcttattggtatgttttgatgagaagagaaaagagataatattgcgaaatgagaagctagagtttgttggattaagtggataaggtaaccaataggattcaaccattagatttttctcttacccatcttattctgatattatctgacgtcgttttgcctcctttgttctgattctttcttttctttttttctttttctttttcaatatcaattcaaattaaggcctgataatctagaacatcattgaccattagaggaccaaatcatttggattgatcatctatatgtgttgggctttgagcttagaagattgaaacttgggcctgaatcaaaattagctttttctagaatcttactacataggccttgttcaattgggtaccgctcatagatggtttcccagaattctagctaatcgtccgaggttactacttatcatcccaaatctactgtatgacctggattatttacttattctagttatgttttttcggttttacacgctcatccccttagacaaccttattgactttagaagaaattaatggtgatgaacgattaagattgagttgtttgaatgttgggttggctgattttatagccataaactaattgcattttcagcttttcctcaacactttttgtttcttaaatttccaccataaactttgataattctttaaattacaacatgtactttcggattcatccttaaacatacatttccaattgaaccggtcattaaaccggaattaaccacaaattcgcgtttactgtaccgcgattgcgatttacccgattaatcacttatatccgttaagaaaagggttggctgattttatagccataaactaattgcattctctgcttttccccccacactttttgctcctgaaatttccaccataaacttcgataattcttaaaattgcaacatgtactttcagattcatccttaaaaatatgtttccaattgaaccggtcattaaaccgagattaaccacaaatccgcgtttactgtaccgcgattgtgatttacccaactaatcccacacccgttaagaaacgacgtcgttttgtctttgttttataatgtgaatctatctatatatgttatgtgttgtgttaattggtaaggaaaatgacaaatcgaactagataaaactcctaatcataaggatagataagactccaaatcaatcagtcaacctaaataatatcatcttaaagagaatcattttccgaaaatacatcatccaagatagacaaaaaaggttgaagattgttccaatgacaatctaaatcaataaagaactagaactactctcattgatcacatagattgcttttttgtgtgagtgggattagtcgggtaaatcacaatagcggtataataaacgcggatttgtggttaatctcgatttaatgaccggttcaattggaatcatatttttaaggatgaatctgaaagtacatgttgcaattttaagaattatcaaagtttatggtagaaatttcaggaataaaaagtgtgggggagaaagctgagaatgcaattagtttatggctataaaatcagtcaacccttttcttaacggatataggtgattaatcgggtaaatcgcaatcgcggtacagtaaacgcgaatttgtggttaattccggtttaatgaccgattcaattggaaatgtatgtttaaggatgaatccaaaagtacatgttgtaatttaaagaattatcaaagtttatggtggaaatttaagaggcaaaaagtgtggggggaaaagctgagaatgcatttagtttatggctataaaatcagcctacccttgaatgtttgaagtcctaaaacggtattggcgggaacttatggtttttcaaaaaaaaaaagttctagcagtaactatcttctcttatgtgtcccttagaaagcgttttgaaggcattagaagtcttgaccaaaacttagtgacttttggatccaacacctaaaggtggatgtattgagttagaataggttaatgtggtgattattcttcaaacacgattctaagcaatgctcaaaacaatcaacgtggtcccgaaactcatattttggtttacgtttaaagacaactacaagacgtgcttcatttctacaagacaataacacttggatcgtcaacttaatactcaaggctacgaatatgtaaaatggtataagagtgtcaatccagagaactcttcgaggcatgcattttactactgtccaaggcatgcattttactactgtccaaggcagtcgtggtaacaaagggcgacgaggaagaggtggaccgtggacgaggcaaaaaaaagctttaaatctacacatactcctcttcccttctcttgttgattgcttacttcaatgtaatcacctactatcatgtacttttataaaaaactactctatgatatctaggacataggcttgtactatttgctacctttagattaatgcaccaaactgtttcaaaaaacaaaaaaaattggggtatgcatgagtgcatgatatttcaatggtgtgaccgcaaatttgttgtaacactccggtttcaggaatatggtgatgcatacaaagaggtttaaaagaattgatttggtcacttatgccaccaaaatgcacttaccttgttggtcaaacatcctaagaaaactttacaattaagagtgattgggttgtggagtaatttcagaatgagtgaccttctaggaagtaattgtcggaactgtgcgaatgaggacaaaacatggagaaagaatatctggtaatttataaggtcggtaaacaagtatttaaagccttccagacatagtggaccgaccattggcagggatggatccatgggtccgtgaaaggatgtgaagcccgctgatagagatggccggggcgttacatttgtgatgtttgatgattctttacatgtggaaccatgtgtaaagttcttagaaagcagctatgaaatgggttaaagaaattggaataaagagatcaatggtaacaaacaagtaggaacaagaccagtcttgaacacatacaaaataaacatttgtgatcccaaatttttagggccgaggtataaatatattgcacttaatctaattatgatattaaaattttatatattattgtgttattttctacaatatatctctaggttcttataattttgtttattcttattctttagttttataatttaaagaagatcaatgttcccaactatttaagttaacaaaaagcactttttatgcaatcgggttttgggtttaatgtatctctttttcttttttttttgttaaatggttttatgtatctcattctaataggtccccaacttctttttccttggagtgtgttgatgacacatcgatcaatttctcgaaataaagtttcagccgagatacttatgttgttgtgaacactgttattcctttcttttcatagtgaatagatagtggtcaaggccggtcctgagaatatttggaccacatacgacataaaaataggaacctttcaatttataattttaatacaatattttataacactaatattttcattggaaaaaaaaattcagtgatttttgtttttgaagttcacaaaaacattgaactatatattttaatttgatagagtttatttaaattattattttttactttttctatttatatttgtttttgtacttactaacaaaaaaaaaacgggaaaaatgtcgtttaatacgcgaactttcaaaaatggccatttaatacgtgaacttcttagatggccatttaatacgtgtaaaaatcgttgaccggccatttcactcaaacttaatcgttgacaagacaaaaatccacacgacgttatctgacgttaacagatcgataacggccgttaactagtttccgttaatttctaatacgacgtcgtttaactataatcgaaacaaggaaaatgtcatttaatactccaactttcaaattatagtcattttatacataaacttcacatgtggccattttatacatgaactaaatgttgaccagcaatttgaaataagagaatgcgttgaccagataaaaaagacattaccgctatataagcctagacattcaaattttggtataggcttgttcgtgtttattcggccaaaattgttcaatttaaataaaaattagtttaatcttaataaattttagctatactttgcaaaattttgtataattttaatgaatatatctaaatattttttgatatctagtttatttacgatattcttgttattttttataaaactatagctaaactacgtttagtaacatttagctataattttaaaataaaaaaagaaaataaaatgacttagatatccagaaaatatgaaacattttttttctttcgaaaaccgttccgaaaccgatcaaaatccgacacctatccaaaccgaaaccaaacggaatagtaaaaatccaaattcaaataaatccaaaccgaatccgaaccaaaatccgaatgtttaggcttatatagcggtaatgtctttttagcatggtcaatgcattatcatatttcaaactggtagttaacgtttagttcatgtataaaatggtcaaatgtgaagttgatgtataaaatggccacaatttgaaagttggagtattaaatgacaattttcctgtttcgattatagtaaaacgacgtcgtattggaaactaacagaaactagttaacggccgttatcggtctgttaacgtcagataacgtcgtgtggattttggcctgatcaacgattaagtttgtgtgaaatggccggtcaacaatttttacacttattaaatggctatataagaagttaacgtattaaatcgctactttttgaaagttcgcgtattaaacaacatttttcccaaaaaaaaaaaccaacaactagcctcataaaatgaaagtttctaaaccaatgtttcatgttgctcccctaagagccagccctaataatcgcgtgacatacttactagctagtggcttcgttaatagggttttaaagttttttttttttgggcaaaaggttttaaagtttaaggtattacttatagttatatatggccaaatccaatcacattattgttgtatcatagatgcatgaggtcgactataatactttaaagtggctcatataaatctatatatatatgagcattaaataaaatttggttggtcaggagaaagaaaaaaaaaacacgttatatgttcaatgtggttcaaaacatttttgatcccacatgcagttacttaataacatgaaaatctttttttttttggacaaaataacatgaaaatcaaaaacatgttttattatatataattagtttcgtgaatctgaatataaaacattttcacggtgacccaaagaaaaaaaatgacattagcatatagcgaaagaaagaaagattaattgattgagatatataaagtccaaaactattatatagtttctaattaaatgtaaaatattttgtgtgtgtatatgtctctccatttacgtcttggccatatttttgctatttttgaccattaattccaaattgctttacattctttgcgcattacctaacttgttttagttttgtcccttaaggtcccaatccaaaccagacatgtcaatcgcactttgtcgagtaattcggttaggaaatgattactaatttattcgttatcacatatagttcagaaaaaaaaatagaattactaaatttattgagaacaatagtttaggttgggaaagagggcgcttccatgcaaaccgtgttactaaatttaaatttaacattaatttgattttattttatataaaaagtaaaaaacaaaacataaaatagaactaaataaatatatattttattctgcattaacatcatgtatattgaaaacaatagtttagtttttcttttgttcagtcttgatttgattacttatgtttttatttggtttgtggatatattaaacaaaatatgtttgtttaattgtttctggttttgcttagattttaaattttgacctagcaaaatgccgaaattggataatcaaaattatatagttctttaatataaacacggcctaattctgtctagctatatatatggtagagtggctgaaactatatataaactagttagtcattactttggattctgcttatatttcacctgttgggaaaaatatttttttatatattttataatattttcattttagatgaatattggattaaacagtggattttgaactcaaaaataactgggaatgagtagagatgactcatgtctcttatatattactcaagtctctttcatctttctaatgtagcatcttctccacataccccctcgacatattgattcttctagccattgatctcgacataatccatcacttctcctcgagataatgttttctttaaactatctcaacaaaattgagctttcctttagatcatcaattagtagggatgattggaccactttctggactgaattaatgggtaagtgtgtgttcgggctcagctaccatgttaaatttcataataatattctatatttggaaattgagtataatcttaagtgatatataagatataagtctcaccattcattgttaattggtttttagttggaaagtccacatttaatatggtattagagtgtaatccgcacatattcaacttaatccacatcggtccgacccaatagttgttctgtcaatctatatttgaacataccgatatcaattagtagaagagtcatcaacttgaggaggcgtattcaggataacaataagccacattcaaatttaagttagatcttaagtgatatatataaattataaaaaatttcacttattgctaattggttttgaattagaaactctcgatctaatatattgttttataagaactaagaaggcatacagttttgttttgttttgtttttatagttttctaaaagcatatatatttactttagtctaacatcaagactcggattcttgactttgaagctcaagatctttagaaaatccttcccaaaaatgtttagtcccctccccaaagttattgtgctttcatcgtggacatatatatatttttacccaaagagaatctacacagatatgatagtgtcttaataagttgagtatttgatgtccaaagaaaagagaacaaaacccagtcatcaagatcatgtgttctaaagtggagcttgtctctgccacactaaaaatccttttcaaaggcatgcaactcacgacaaacaaaaacacaccaaaaaaaaaaaactaaatcataatctctagaaaagtgagaggtctttttgacatgacaactgcatgagtctttggctcttattaacaaaccccactatacatcacttcctatgtttcttcagcaaatcacatttagattatggccactcatatataattattttgtagggttacaaaaaattccacgacttttataacaagaaattcgaatgccaaaaattacaagttggagttgagaaaatgatggaaaataagattagaacccactccaaaataagattatatcttttaactaaaagtatctaaaatggcgaattttcagtcttaccctaaataaaattatagcatttaaagtttaaactatacaaatttaaaagtctcataaaagcaaaatgaagaactcgatcagaatttagagtctaaattaactaccttacatagatatatgaatatctattaaatggaggcaaatagatattcaaaggtttgattaatgtgtacatgatctaatttttttattttttttttgataaccctacatgatctaatttgttctccttctctacatgaaatattattcacgcatctatggatacatcgatccactgattgttaatggatcgatgatgatgatgaggttactagactttttgaaacaagactttggagatgtgagtttggagatgatcgccacataaagcaaagtagtaaaatgcttttgctacatcaagaaacgtgatgctgacgtcacgaaatgtgtcactctccgacaatgctaactcaaccattttccccatctccttctccatactctttattgtcttctccttctcatcgtttctccttgcctgcattaagacaattaataattgattagactccaaccgataacatcgaattgatcaatatgaaccagtaacatagaatggatcaatcattttcaattgatttacctgttggttcggtccaaaacacaagcaaaaaagttatggtttagggtatcggatttataggaccaaattttgggaataaatgaattgtttttttgtttaataacaaaatcaaagcataatgagtacattttcataatcatataaaataaccagttaataactaacctttaagtattggcgaggaagacagattcgattgatgatttccgcgagacgaacgaagtgagtgtgggtgaagaagttagttaggtcattgttcttcattagaattatcatcttcaccatgagctctccttctccttcatctccatatagtttccatttttccatccaatctccccactatatattacgtaatagataaatcatacacttaaatgcatatagatttgttttaatgagaaagagagaccctaggccctagcacattgtttgatactcttctatttgtttcggatatatatcttatttgttatcatgaaattctatctatataatgtttttcaaccacacactaagtaaagtattcacaaacgagaaatcaagttggttccaaactttcagtattcaacaaatgagctaattaaaaacaaacaaatgagctaatttttcttgaaaaaacaaaccaatcaaaacataacatgtactattcaaaattatataattaatatgtgaataaagcatggtattagtttgtgacttattctagcttttgggcattatgtgtggcctactttattatgtgtgtatttatgttaaaatttcagaagaaagagattagaaaaatatacactaagctaaaaacatgagagctacggagagtttagagagacgtaccgatagatagaggagattgttaacgtcacggccatgagacatgaaaaggtcaaaagacatttgattcaaagtcccgattaacactccggcaagccgactggcctgaaccgatcctggtcggtccaatctcatgttcctgatttttcatagccatcatgcaattttatattacagatattttcaaaaaataaaataaataaacaatatagacaaatgaatcaattagctgattctaccagagctttctttcttctataacttgacttcccttcagttttcatttttcaaagattatatatatcacacacataaatctcaaattttaccttttgtttgtttttaacaaagatattttccttttgtttgtttgttgtatatgaactttcatttcttacagttcggtttcgagatgttttttgttttgttgttatacacgtcacaaattttgatcgttgtgaaatgtgaattgatctctaattttaaccaataaaaaatataataatatatatatatatatatattctaatggagttatatctgtttggcggaaaacgccatttatattgaaaaacaattctgcacatcaccagtgcaatgaaactgacagaattagttctctttctaaattaggtcaaatgaacttatctttcttaattaattaattgtgagatttttttctttcatatatagcttggtgttttctgccgcaaaacgaacagtaccctaacgaatagggttaaaaacgaaaaaaaccagtagatggtaaatgaaaacaagattttagtgattttaatagtacaagcgttttaaaaaaaacaaaaaagaaaaaaagagaaaatttaatagatggacaaagaaaatttgcctaccaattttgaatgcctaaatccagaaaaaggttaagtaaagttacttaattacattttaaaatcggtaaaaaataattggttaagtcaaaaatattttcagatcacgtgtatatagttcagtggtttatactagggcaatttaattgattcacattgaaaaaatataaaacatatgtttcaagagagtaatttacctgtcattaaagtgatgatcacttcgtcgagcattggcaatgtattcatgaaactgatcggagaagcttcttctggagtcagaggattccccaaaagaagaagaaatggctttaaccaatacacttgacttagcccaaaccattctctcatgtgacctttctgattcaaatatagttgcagccgctaagtagtaacactcgagaagctcacttctgcgcacaccccactcacttaacctattttcttcataccacctgcgttcaaatacaaactatattaaatatacgtgtacacacacatgtatatacatataacaatcacaaataagaaagagaaataatattatgtagtttattattttctgactctcttaattcttacttgtgatattaagataaacaaaaggttattaattctcgcatatgaaaaaaaaacaatttaactaacttaatatatatatacacaatcatttaaagccatacttaatgaaaagaatgaagagtgaagaggctattacttttggaatatgtcccattcgagctgatgctgagcttggcaattgttgtaatcttgttttgctaattccagatatccattattgttcacgtatggcatcctaaattgtccaccatcattattgattaatttaatgtatatcatgattaatacttgcaattgaaaagaaaaataaaaagttacaactaccggcagatttagttaagcataagaaaaaaacagaccaacatttaagtttagatatttgcaaatgaatttggtcacttaaataaagaagatgatcaaaatacgcttatttcccaaaatatacattaattgtcagtgtatgcattttaacattacaaagcaaaagtgcagtgcatttttttattgcaatgcatttgttttggattcatgtggtctatttatatgcaaaataattaaatttttcaaaaacaaaaagtaaaataatatgtacctataaagagtcttgccaatccaaacgtcgttttctccaccatattgatcaatatagaatctcgtctctactcgaggcaagcttgcgtaccatggaatctctaacgcaaacccaatctatcatgcaaaaaaatatatcgagataattagaaaacccataaaaaagtaagaaataagaaattaaaccaaataagcaaaaaagagcaaacacgctttgtcgtgttcctcctccatcagatgaccccaaaacggcatgcagtgcgtatgaatgttttttggaagcatttgtaataacgtgtgtttttggtcttatattacatgtaacgtacctcgccaggtaagtctttcattataatccacttatcaatcaactcctctctctcccgtttttctagcagataattataagaaaactctttggcgtttttcaatatctcttcccttggaaacgccaattgtgatgcccggtataggttgaacataccggttactgcttggtttgattgccccacaaagcagaaaaactctccctctttctcaaagttcttgaatacatctaaaattaaagaatgagcgtttcatttggaattaaatgctaaagtaaataaccaaaaacaaaatatgagttacgttgttacctgcggacacttggtatccatgttgtcttaagagcctaaatgccatggctgtatcatcgatgtcttggacatgggaacatctagcccaacatatgccattgtcggtccaatatctgatatttatcatcatcatcattagagtaaccctagtttggtatacaaataaagttaatacatataaacgttttaaacctgtggacatagtcaagacactctttaatctcttcttcaaagtatctcgatatccctaaacgttgtaaccgatccactatccatatgtgctcgaaaagatccacgggaaagacattgggaactaaaaaaataaaagaataatttaagcaaaaataataaatagttaacaaaaattagaagttatgagtatatgtcttcgatagatacaatataacaggagaagtggttactcgctaacaaacctcctccattgaaacgtttgacggcatttcgcaaatactcgaggcagttactgtctcgggtctgcatgaatgcaaaagcggtagaggaaggagagaagaggaaagatccgtcttgagattgaagtttcaagagcttttcccaatctaaatcacgcatcccctccaaactatgcaacaatgttgttggtatcttgtgcattatctcttttggtatcctataaaagatctcacatgtacgaccaaaatcaattcatatcttagtctatgtatattacgtatgcaaatatatcatcgtataactctttttttttggctttgagtgaagtacataggacccatctatatatactttgaaatatattcatataaaaatagaatgttcaaatgtatattttttggcccaacacacaaaccttgtaagctttagctctttcttggcgtatatatcttttaagaccggagaatcgtacggtacatcaatgtttattcctcgagctatctcaagcaacgatgggaatgctacttcgaatccgattggcatatgctcatcattttcgtcttctagcttcccaatattttcccggaaaaacgtgattcctgaagtagccattgataaatgtataaaagtcatgtataatacctactaaagtaaacataaaaaagattgaaactcttcaaaagaagattgttgttttaactagactaacttatataactatagtatataatcaacgtataaagttaaaaagtttagaccactaaaaaagtttggattttctgcaaaaagttaagattttctttttgttttcttgtacttcaaaataataaataagacaaataaataaataacctttgttgcattgatgaggaaagagattccatgatcttagagcaacgacgcatgcaagggtattgatgagacgatcatgataagagaagagatacgcatctccccaagaaccatcggaaagttggttctcggcgatccatttcacggcggagggaaacgccggagttttatctccggcatcgatcaatgcaacccaagctgtatcgtaagccgatatcgtaatttccccgtccgttaggtttctcaagatcgttttcacactcttcactgcttctttgaatgcattactattacttccaacactaatctataatttaaatgcaaaaaattatcatcagcacatacaatcatgaaaaggtttgaattaaaccatgcatatgtataatttcatgcatggaatatatatatagtcttgttacctttcggtgtaaaacataagaactattttttgatggaatgtaaagtatagaatccgggggaaaatgtttatatcacggtaaaaagaatagggaagaatgtaggaaaattaaagtattataatatggatttttgtaattctaattgacaagaaattttattctaaaaatcacctgaggagcatcttctccttgaagctgttgccactcatgtattagaggcaaatcatgttgaacctcttgagaattaatgtattctagacacacacacacacacacaaaaatcatataatttttagcttcttatataaaaagggatgaacttagacttgaaaacattaaacttataagtaatattaataaaattagaaccttgagttcgaagctttgaacaatgtatggaaccgcttctggatttgtctctagcgacattgagaggagatcctattcaaaaaagaatgagactagaggagtaagaaagtaataataaaataatttgcttactatgttatatagtaatataaactagtttttggtcgtcaaaacattagtttatgtttgttggcaattataatactaagatacgaggtcaatccattctctaatgagtactagattctctaaacgtaccttttgtaataattaattaattcaaactgaaaaactttttatatcatataatataaaacagagtatacacatttgcatatcgaattagaggaatacattctttcgaaaacaaaatcaaccaaaaatgatgaagtttgttttgtccaaaaatcaacagagacctaataacaccaaaacacattttacattttttctttttggtggtaaaaacagagaaaaacccatttcgtagttgagtcaaagaaccccaaatatcgaaaaaagataaacaaatcgaatttttgggaaagaaaaaaaaaacagagagaattttggagagtggttaatgattctataatgctttgaagaaagagaaaacaaaaaaaaaaaaatcgaaaggaagatgatgatgagagatatttcacgcgtgggtgttgagagaacataaaaacagagtcatcactctaatttttgttttgttctctagggaaaatcaaaaagaccaaacaaaaatttcagtcaaataatggatcatgattaaacccacaagagaatttcgattacaaaactcattagataaaaaaagtttgagactttatataaacaagtgtgtgatcgtatgtctctgacaagacaaagagagagaggatgactcacctgagatggtaaggaaagaagaagatattgttgttttagtagaactgagaaaggttgtacttggaatggagtttagaacatgatactgaagagacatggctttaaaaagctctgttttctctgtctaagtatttagtgaagaagagatgatgaaactatttggtgagaaagagagagagagagaagtcttaatgggtatttataaggacagaaccgacttcacatcagagattgtgtttcattttactctttgagaaagaagagagagagagagaaggatatgatgcatggaatgtgtttttgtgggatcttccaaagctacggaattgaagggtaaatttggctttttcttctatttcctattctcttgtttatatctcttttacaacttgatttttttttataaaaataatggcataaggtcgatatctttgaaagtacacacacacatacacatacgagggcttctaatcatatcatatcacaaacaataatttttaaggtcgtaaaagataattaggaaacaatatttgtcgtgtgacaagtcatatatgactattgcaatagaattattataaatttgtcttggtgtaaaaaacaaaaaaaaggatggtacttatctagtgtcatatggtactaatctatttgggattcctttttttgtcaagtttaagattattttgttttaatcttaagtaacaaattagtttctgtttaccggaaactctaaatacatggattgatatatttgtcgtgtggacaggtaacaatacattactaatattgcagtaaatctttataaatggtatttgtctcggtctagataagaattagaagtagatggtatattacaatctcttgtcaaaacagtatcaatctggtagtaattcctagtttgtcaagttcaaagaggagttttacgatttcttccttttacttacatcttatcttaagactctagactctctctatctttttccagtttttcatggattccatacttataaaattaggaagtagaaagtacacgtgtagttatattattgcatgtataactatttgaaatttgaattactaccagtcaaatatagagttgagacgttttttttgttacgtgacaatagctttaaaaataattacagtagtcttgctactcatcaaatgcctaaataaaataaaataaaataatgcctaaattatttattcaaacatatatatatatatatacgaaatgatataatttacatatagttatatcaggaaatgtatttgtaaactgtaaaaatctttcaacagatgttatcatattttgtgatatataacgaaatgatatactatagttttggaaaacaacaaatcactaaatgatacatggttgatcgaatttgcaaaattatcaattttaggagaaattatttttgataacggtttataacgatactcataaataattgatcgttaacgtgcatacaataaaattaacgaattccaacatttctataaattacatttgactcaaatatgtcaaacatgaatctcacttaatgtcaaacaatatgttattgaatgaagtactaccgttcggaaaaacgataaatcattaaatgacatgtggtagattaggtttgcaaaattaacattttcaggagaaaaaatttctaataacggtttataacgacaacaataaatacttgatcgttaacttgaccatacatagtattaacgaattcgaacattccaacaaaacgcatttgatgcaaatatgccaaacatgaatctcatttaatgtcaaacgacatgtaatgaaatactacagttcggaaaaacgacaaatcactagatgacatatggtagatcaagtttgcaaaattcatattttcaagagaagaaattcctaataatgatttataacgataatagtaaatagttgatcgttaacttgaccacacttaaaattaacaaatttgagcattacaacaaaacgcattttatgcaaatttttcaaacatgaaccttatttaatgtcaaatgatacgtaatgaaaaataaatactacgtacgattctagaaaaacgcaaatcactaaatgacacgtggtagatcgagtttgcaaaactaatttcaggagaaaaaagttataataacggtttataacgacaataatatataattgatcgttaacttgaccacacataaaattcacaaattcgaacattccaacaaaacgcatttgatgcaaattagtcaaacatgaaccttatttaatgtcaaacgatatgtaatggaaaataaactaccaattttgtgttttaatttatacttgaataaattcagaaatactaatttcgatcatcggtgttcacctttcttctaaaattgttatacatattattggagatctttgtttaatatatagatatatagatatctatatatctatatatatatatatatatatatatatactagattttaactcgcagtacaccatatgacgatttattttctataagtagtgtatttgaaaatttaatgattatatattatatataaaattttacaaattgcactaatttttgaagatccaattgtaccaattctataattttacaaattagtgaattttctaagcctttaagataactgggcctaagagtctttaaaaaagcccagaaaatgtcatcgtccaggtaatggggataaggggttttagattcttttaattttgtttccgagtttttcagccatgtttgctcagttagcaccatcgccgtctccttctccggcgaacgttagccacttcgttcaccgtcgcaccttccgtcaatgtacatacgccgtctccgcttctcttcccactgcaaattcctctcgtccaccaccaattcaggcaaacattgtcattctaattctactacttcgtggtcttcttcgttatctgaaatgaaattgagaaactcggaaacttgttttgcagattgttggaggaaaggatttgaatttggatgttacacggaaagatgattcaattgggttcaaattagaggcaaatgaagatgaaattgattggatgaatctagaatctgatattcgtctatggactagagcattacgtcctgttcaggtaaaacaattacgagattatgttgtaaagttttggtttttctgaatatgaatttgttggattgttgtttactgtgtgtgtgtacgtgggttcttggtttcatagtggtatccagggcacataatgaaaactgaaaaggaacttagggaacagcttaagttgatggatgttgtgattgaagtccgtgatgctaggattcctttatcgaccactcatccaaaggttagtactttgcatctaaaggtctttgatccggttttttagactatgctaattatattactcagtctctctaatctttgttcaataggagcaagtgaagtctatgacaaaacttttgtgttgttcaataatgtttgcacctacttttgggggttatgtatgtggtattttgtagatggatgcgtggcttgggaataggaaacggatattggtattaaatagagaagatatgatctcgaacgatgatcgaaatgattgggcgagatactttgcaaagcaaggaataaaggtcattttcactaatggcaaacttgggatggtatggtttcttcaagtttaaactttgctttgggattggtttttttctttctatatgtttaatctgagagatggttacagggagctatgaagctaggtcggttagccaaaagtttagcaggtgacgtaaatgggaaacggcgagaaaaaggacttctccctagatcagtaagtaaagtgtctcatgatccattattctctgatgcaacatatatgatttaaattttaagttcatttcaaatgatgcaggttagagctggaataattggataccctaatgttgggaaatcatctctgatcaatcgtctattgaaacgaaaaatttgcgcagcagctccaagaccaggtgtaactagagaaatgaagtaagaatgccttttgaaagcttggttttttttgcctcttaaaactcagtttccaaacttcatatctggcactggtcatttttcttatcttactgtaaacagatgggtcaagcttgggaaagatcttgatctcttagattcacctggaatgcttcctatgcgtatcgatgatcaagcagctgctataaagctggcaatttgtgatgacattggagagaaagcttatgacttcactgatgttgctggaatccttgtgcagatgttagcacggattccagaagtaggtaagtttctgaacattaccattttttgcgatttactcttttctctcattttcctgcgctaaaaatgaaacttgatattctctcctttataacaaaaaggcgcaaaggctctttacaaccgatacaagatccagctagaaggcaactgcgggaaaaagtaatgaaacttcctcaaagagagctcatttcttttggcaaaccattgttcatggattcttattgaatctctgctctctcttttgcagatttgtgaagacgcttggtcttaatttgtttggtggagatagtcatcaagctgcatttagaatactaacggattttcgcaaaggcaaattcgggtatgtctcgttggagagacctccactgtgatccaagttagtaagagatatgctcaaacttatgtgttaatttatgtatgcaatatatgtcttgatgtatgcatacttgtgtattccgtttgtcttagaggacatgataaatactagatatagaccaaatccatgacgacatcagtcagatgctgctaaatgctaaccatttttctcttaagcccaaatgtatgaataatttgttcatgtaaaatatggttaattttttttttgttgtcaatattttcaaaagctacgtaatggataattctataatgttcataatacaattcatgctggtgaaaattttgtttatgatttaatattcagattagtaaacttgtagtatttcagttagataacaaattaaatctttgacattaaaggtggttaaaccacgtaacaaataatgtttttttacaagattctattcgaatagttaagcttttacaagttcatacatctcaagagttctaaaaatcttatagagttgagaaacgaccgttggattatgaaagtgggacctactaatccatctgtagatttcttttgggatgcaatgaaaaagtcgtcgaccaaagtccccacttctagatctacttttgtctctttccattattaattgatcaaaaataaaacaaatttcgaaaggagttacgaaatcagaacgttgggccgatttttcgcagatcctatttaaattttatcttctttccacaatctctcatcttcaataaactagccgttacatctctctctttctctatctccatcaatggctgcttctgtcgaaactccttcacctaatcatacgaacaacgtaagttcctcttcttcttctactttgattctccaatcaagggtttgattcaaaactggaaattttcatgaaattatttctgttttcaacaggaaggaacacgcttgaacatggtttctgcaacttcttttgattcttcttctccatcggttagtccatcttcagacaaacgtctctggagcaatgtacgtaacagggttgatgttcttctcgaagaaaatagcaaaaatcacaaacccgttaccaatacgattgctatagaatcagagagatcaaagagatttaagaatgattcgatgcttttgcttaaagggtttgattctgtttctcatactctgtctctcctttctagtaatctcgacaatgcccttcaggtaaattttaatctgttgataatgattaggtttgtttcattctccaagattgatgataatgatacaaaagtgtgtttctgtgtaatcagggagttagagaattagctaaaccaccttcatattctgagatactccattcgaatctcaaagctgatcagattcaacgacaacagaaagaagaagatgaagaggaagaagagagtaaagggaagaagaggaaacacgaatctgatgttgaacaaacagaagattcgtctaatgaagaagagaagagaccaaaagagaggaaaatcatgaagaaggctaagaacgtaaagtcttactctttagtttactctctttttgtttctttcttagctgatgttgttaataaagattcaatttttatctcttgcagattgctatatccatggcagctaaggcgaattcgcttgcaagagagcttaaaactataaaatcagacctgagttttatccaagaacgttgtgggttgcttgaagaagagaacaagagactcagagatgggtttgtgaaaggtgttagacctgaagaagatgatttggtatgtacaatctcaaaaatctgttctgtttctgctctgttatgctctgttttcttatcttaagattttgattctatggaacaggtgaggctacaactggaggtgttgcttgcagagaaagctagactagcgaatgagaacgcgaatttagttagggaaaatcagtgtcttcatcagatggttgagtaccatcagattacatctcaagatctatctccttcatatgaacaagttgttcaaggtttttgcttagatttctcatcccctctgcctcaatacgatgatgaagaagaagagcatgaaacaagagctcgagatgtctcgaaagccctcaacgaaagctttgaaaaagctgaagaagaacaatactaatcaagacactgtttagactttgtgttttcgttaaaacctctaatattttcataattgattaaggtcttgtgtttttgttatgagtagcttcttggtctcttagatatgaagatgtaacataccactgtttgttgtaataattttggtcactgtgcgttagataagcaaattcaatatatgtactatgcttttgatcttgcaaattgggtctaatgctggttaatgactatgtttttgttatgattagtttcttggtctcttagatatgaagatgtaacatacctctgtttgttgtaatagttttggtcacagtacgtaagataagcaaattcaatatatgtcctatgcttttgatcttgcaaattgggtctaatgctggttaatgactactgtctgtaataattgccttctatgcttgttttagtgagttttagtgaaggttcttgtgtttactaatccgatatggccttttaaaatttgttagaatcagggctgattagactcggcctgttttagacctggaagggccagacaaaagcctgctgtttttacatgtatgtttcaagaacagccacggatcaaaaaggaaattagtagttcaagaagttttgtcaaaaataacaacattcttttttgtgaaaattatgttcttccttatccagtgtttgcagaataaagtctacatagtgcttaccattagattaatagtgtaaacgtacgttgttagtttttctaattgaattcacaactttcagctaatgacatgtctccttaataacccaaccttttatttaatgttgttataaacaaagggatgagtatagtcaaaagtttgagaaaagaatattcccagttgacatttttgtgtaaacatgaaagagattccaccttactttgttgctactaaaagattagaaagttgaataaagacttcaacaaaataacacaaaaatttgtgaaggatcttaacttttgatttccctttacataataatttgcaggtcagcagtggaatgttgatgatgaaaaagaatcatgttttctttcttttcttctgattggtttggacaatctacaaaacaccaatcgaagcaaaaagatcgaaaaagtagagattggcttatgggagagagggagagataggatggtacatattcttcttagctttctacttacttagcatatctactaatccattaacatagtttatttcagcttttaacaccattaattaataccaaaaccgttgtttgtgtaacacatagtctttgaaaagctttcttcacttaaattagaaacttcttttaccattatatttaaatccaaaaaattacgtcgtcgacatcaatgcttgtatgtagtttctcataaatgcatcaaatgccataagacccacaaataaataacatatctctttaattagatattcacacatgtagttgccattagagagcattcatgtgttttatctttcatcagacatgtaagtacattttgaagtttaaatggttgggacttgttgttcaagtcttgcgcgcacctggttaagtttgtgtgattcttgcatgagtatgactcaacatttatcactgtatgaaacaaaagctctgaattttcgaagattatttgtgatggtaatcggtttggcatgcatatccaataaagaataatatatacgcgatcttctatgtttactattcgtgtccttgcagcagaatttgcaaactggaaagtgtcgattatttattggtatctttgattcttgacttctattattagattcttacaccagtcacattttaaggtttccccatgtgtttttgtggaacaacctttaaactgtacgaattcacaaaatacaattcaagaaagaaccatttcttgtaacttcgtaggttggtaaggttttagtaaattgtttcgggtccaactcgctacaacatcttcttttttctttcatacgaatgtaaatattagttcttgaaatgaaagtttaaaatttacatcaagtaaatcctaaaaacatagtcacatgcctaagagaaaacacggaagcatatatagacattcgagaatcaattcatcgactaaaccataaactgtgaagtttacggcaaaactatgaattggacttgataaagagactctcctaaacaaaaacatggcacaaagcaaaagtagtaagagaaataaagaatatgaaggttgaagagaaagcgaagcggaagtcctttcaacgtgagacatcgactagctacaagatctttattaacgtgctcaaataaatgcatagttgaagatttatataacaaaataaatttgtatgtaagctatttaggacaaataaaagtatatgaaaaaataaaaatatatatttgctttaaacaatcataacaaaaaaaaaactgaaaatgaaggattttgtgcacaaaaaacttttaactagccaaatttttgtatttttatcttccacttctaaaaaatacagcttaatcatacaaagtcaaaactaatatgcaatataacattttttcgccgtcaagtttgtaaaatttgacaaatatatgttaaatcaaaggttatgtggctaagatttcagctctatttttaaaaaataaataatatatatgaccataaaaacgtttataatatttttttaaatgtttacaatattttttatgtaagattaatttgtattttttaaagataaaaagttttattttgcacaaaatccaaaaataaatttatttctacatgacaagttgtataattgtgattacggatctattgcaacacgagttttaacatgttataaaatacaaccatattcaaaagtcatttgttacgttttaaaaggaaaatccaatttcctatgaatggtttaaatagaaccaaaatataatctcgtcctatgttgaatttcgaagacgtcaatgcatgaactattattttataatttggcatctaccgagaatattattggttggttgttgtttattttccctaaatagaaaattcttctaattatagacgacaagaaaatgcttttttctttttattattcatgagagtaaaaccactagactacttgaaaacttcttcttgttttgagtgttttttttccaataatagcattccattattctagtattattcaactatttatttagcatttcgatgagtgactgccacttcttatctgttttattttgtgcaacactttttttatctgttaagagggtaaataaatcatcatataatttgtgcacaaaaaaaaaaaaaaaaaaatcacataatttacaacatttgaattatatatcttgtagacacatagagtcatagcgatcgtggacaaaataatataccacaactttaataaagtttaattataaaaagaagtagcttaagtgctttcttttattgataggcaataggttggtgaaccttcaatatgacaccatttttgtgctgaacataaattacggactattatatatgtttttaatcgatcagagcttgtaattttcgtggttatgtttgatagtttcaatttaaacccaaaatacaatcaatgaataattagtgcatattatgttactataattctcagttctcacctagtgtttggtatgcgatttttaaaatgtttttgctataataatgatttttccgaccaatatagaatcaaatttcgttatgaaaccactctacttgatttaacctctgaacctcatatttgtttttgttttgtcaaagaacctcatgttctaatatcaaatcaagaaaacctattatacgcatctaggttttttgacaaatgacttaagcaaattctatagactacaatatccattacacattagtacatgtaatgatcaatgatgtaaacaaataattttgataacattctagtgtgtgtacgtgtgggtcggtgttcagtcactcagacatattaaattatagtcactggatgtttatgttttatttattggagacttcattggaccgaaataaataggatagtttggaataaataaataagtattaagaaaacttgaaatagttttcagaccacggttgctagaataaatcgatattcgttttccggctactaaaagtataataatcactaatatttaaatttctaatgatacctttccttgttgtccttaaactagtattaaaacttataattcgttgacataatgaaagctttttgttcgtttaatatagttttctcataaagtcataataacaaactttttgttcgtttaatcctgtctaagtaacttatgaatcacaataacaaaatacactaaacaaaaagttaatttagtttataaacgaatgaagtgatataatattaatatttttatcattaaacgtaaatcatagattaaaaaaaagatttggccaaaaaaaaaagattaaagaaaatattaaaattaaaaataaataatgatgattctaccatatttggtagtagtaatttgtaaaaaactttcttttaatgtaattgagttttcagaattcttattttttaccaatccacgtatccaactaatattacattaaataaataaatgttcaagaaactaattggaaatcataaaataaatctccaatctaaagtagaaccgcattataaatacaaactcatcccttctacttcccatcatcttcatcacacacccatactcttcctcgaactctcttcttctttctctcttactttgtgtttgctctgttttgctctcttaacacaacacaaaaaatgtccatcgttgttggccaagcttaccaacatcttcccaagcaagtaagccaaaatcctgacgtgggtggatggagtttcttgcaatatttctctgagccaaaaggcattgtccagaacagagaagacgacacaaagaaaacagcttatgtctacccgatcgagaagcgttccgtagctaaactgagccttgagatgtgcacagagagcctcgggaccgagaatgggagtgatagtggagacgagatgtcgttacttgcgcttgaagcaaccaatatttcaaagagtcctcgtcttactacgaaacctcaaaaagaaactagcttcatgacccgtgagaacagttttcctccgccgctaaactccgtcaacggattcaacaatagccgtatggtgaaatcgtataaagaagacggtcgtcttgttgttcaagcaattagggtttgttctccacctcgttgctttgtatctgaacgtcgtgaaggaaggcttcgtctctgtttatcacagaattcattgaatagccaagacgcagaagaagagtttgaagaagaagatgaagatgatcaatacgatgcagaggaagaagaagaagaagaagaagaagaagaagaagaagaagaagaagaagaagaagaagaagaagaagaagaagaagaggacgaggagggcattgtggggaataatgagaactttgagggtaaaagtggaaataaaaaggttagcaacaggccaaaaaggagatgcaatgaaaatggatgtgagcctaaaactatgcttaattggaagcagcagcaattttgggtgaccacttaatgggaattactcaactcagcaaataattattttttacggcttctaattctacatatataaatgctaaaatgtgagttaattgttacttaaactgtttaacaacatagagaactaatcttcattatctgcttttactttttagtatgttataggtaacctttgattattaacgagagttttagttatgttttcatagactaacgagagtgaaactatagttttaaaaagggtaataaagtaccagtaatagtgagactgacgaaaactatatgatatctttcaaaaaacttcattgaaattttggtaacatcatctacactagtttgcaacacatctttgtgcttctaagcgcagtcaatgtcaatgttattgtcatcactagtcttagtagcaccaagggataccacacttttatcatcaaccatcagtccatcaaatggtcattaattcatatttaagtcttttataagaactaaaggtttctacaattttcaacaaaattaagtaatgtaaatgtcgtttatgagtatgcgaataactttaacattattattgtagaccaaactctttgactgtcacgtgtgcatatttatagacacttgctcgtacggacgtaattgaataagaacatataatttgtaggtccattgtacacgatctctctactttcttgatattcttccctctgtctcgaccaaattcgtactatataaatctcggagtgatatcaaaatagattgcaagtatatgattgagccaatgagaaatagacaacattacgatgtaatgtccaatcttacgtacaaatgtgaagagcaatctttgttctctgcaaacgaataagagaacattacgattctttatatataacatgccacttgactccgcttataattgaccgaaatctaaagcaaatctcatcatgtacccatcttatttggtatattgatgattcgattttattttattttcaatatagaaaatgtattttccatatacttaatgttataaaaaaaaaatcatgtttatattttaattcaagttgaatcactttttgacgagattatgcgaaatcaagttttgatggaaaaaaatatggaattgtgtttttgacgggaaactacggaatcactttttgacgagattatgtgaaatcaagttttgactggaaaatttggaatcacgtttttggcgggaaaattatggaattacgtatttagcgaaaaatgtgaaatcacgttttgacgaggaaaattagttcttatttgttgtgaacagtgaactagtgaagttaaccaaagtgttgcagttttgataaggctaatgactactaattttagaatgatttttattgactgagagaaaattttgaaagttcttttatgtactgcttttattttggttttagattgggccgagacaaggcccaacaaagaaatagctcaaacacactcacttagcaaattactcaaacagcagagagagagagagagctcagtaaactaaacaaaaatgaataaaaacatgttggttcgctctgcccggccaaccctagcctccattcaccgccttttctccgccgccgccgccgcgactgtggacacggcgacggcacccgtggtgaagcctcgcagcggaggaggaaaaggaggagaatcggccaacaaaaaagaaacggtagttggaggaagagacactctaggagggagattactaagccttgtgtatacgaaacgcagcgccgttgttactatccgtaaatggaaagaagaaggccattccgttcgcaaatacgaacttaatcgtatcgttagagagcttcgtaagatcaaacgctataaacacgctcttgaggttcgtgaaatttctctcaattttgaattcgattgtgaaaactctgcgaagtggtaaaatgtttttttttttgtgtgtgtgtgtagatatgtgaatggatggttgtacaggaagatataaagctacaagcaggtgattatgctgtacatttggatttgatatctaaaatccgtggtttaaacagtgctgagaagtttttcgaagatatgccagatcaaatgagaggtcatgctgcgtgtacatctcttttacatagctatgtgcagaacaagttgtctgataaagctgaggcattgtttgagaaaatgggtgaatgtggtttcttgaagtcttgtttgccttacaatcatatgttatcgatgtatatatcgagaggacagtttgagaaagtccctgtgttgattaaggagttgaagattagaacatctcctgatattgttacttataatctctggcttactgcgtttgcttctggaaatgatgtcgagggtgcggagaaagtttatcttaaggcgaaggaagagaagttgaatccggattgggtgacttatagtgtgttaacgaatttgtatgctaagactgataatgtcgaaaaggcgagacttgctttgaaggagatggagaagttggtttctaagaagaaccgggttgcttatgcttctcttattagtctgcatgcgaatttgggtgacaaagatggagtgaacttaacctggaagaaggttaagtcttctttcaagaaaatgaatgatgcggagtatctcagtatgatatctgcggttgtgaagcttggagagtttgaacaagctaaaggtttgtatgacgaatgggaatctgtttcgggaacaggagatgctagaatcccgaatctaatccttgctgagtacatgaacagagatgaggttcttctaggagaaaagttttacgaacggattgtggagaaagggataaacccgagctattctacatgggaaattctcacatgggcttatttgaagcgtaaagacatggagaaagtattagattgttttgggaaagctattgattctgtgaagaaatggactgtgaatgtaagattggttaaaggagcgtgcaaggaacttgaggaacaagggaatgttaaaggagcagagaagctaatgactctgctccaaaaggctggttatgtgaacactcagctctacaattccttgttacggacatacgctaaagcaggggaaatggcactcatagttgaagagcgaatggcaaaggataatgtagagttagatgaagagactaaggagcttataagactaaccagtcaaatgcgtgtgactgaaatctcgtccaccatttcttagtatgaaagctacagagttagtttcagtctgcaacttccacaaaccgaagaatacagaaaccgttctctcaagtccgtaccaatcgagatactcgtcttgaagcagtaacattccacttactcggacatttagaccttgaggagagtgttcaaagctgctaaggaatgaagttgctacaaagatatgatttttcctgttttttaattttcagaatttaatatgattaaaatctcgttttatatttttggttctctatagttcttctgatgatgtcaaatgatctttgagaggttgactaactgaaaaacctacttcgactcttcttgttgggtagttatgacttgtgtaagcttatgtaagctttcaaagacttgtgtccaaagtggatttgttcacctccaaacacttagtcaactattttaaccataaacccatatccataaagcttaataattttttcctaaaacatgaacattttcatggctctactattcaccaattattatagcatttttaaagctggtaggtaaactagatttgggtatccataaaaccttagcattggatgtgtttgaatcttattcctcggtttattttaattgaagtagatggttaattgtaaaactataattggcaggctagagctagccgcccatactaattattaattactaaatttatctcctcgagtagtcatgtagtctcacgactaatcttgatatagagagcccacttgaggtaaagatcatcaactaataaaatcatcttaaaagaagttcgacgaacttgggttggttggtgaaggttgttaagaagaagtggcgtcgttggtcgtttgattttccttatttttcaataaaattaaaaatatagagagagatatggattatgggatagtagacgactataattaataaatgttactttttcttctgcccatttttatatcatagttagctagagcttttaaaatacaagtttacacaaaattagactcaatcctcgaaaagttttggtttctcattgaagaaatacgaattaaagtgattggctatatataaaagaaatactaggatgagacaatcaataacaagtaatgcgaaacaaaattcgcttataaataacaacaaattgataaaatgtggtttgttttgatactagttttatgtgttctcgatagaattgatgtatagccaaaaaatcacaacaaaatgataaaaatattagtttgtagtttaggtcaaagttatagttcttttaagtttaaggaacaatttaaattaaagcattaaacattttaaaaaatgtcattaaaaatatgagagaggcgtttacttaatacaactcaacccactccccgacatgacctccttaatctttcttagaaactctatataatataacaaaacaatataaaatacttctagttcttctggaagtaaatatccatatattaccatggactttgatgcatgatttttcagtttaaaaatgaaaaaaatcagtcaaataatgtcaaattagcatgtgaattttacgtggttgtagaaaatatgtgagtcgtagataacaataaaaacctttccatagtaaaaaaatgtatagtctaatagtttctattaatgttgacgttacctcacggttactacacggtttatatgaataattgcaacaaacaaaagcttctaatagtaaaactttatagtctagtagttttcattaatattggcgttacctcacggttaccacgcggtttatgtgaataatggtaaaaaaaaaacactttccaaagtagaaaatgatatgattatttttgttttgtttcgaaaatttgaaatgaaagggtgtgtaactctcgtttcatcctcgtagtaatgatgaaaccaaattcaaataataaaatcattgaaactcttctttgttgtcaacataataattagttttctataaaaccaaatttgtcgtcatcatctctccttctactttccaaacccattaatatttatagttaagattcaggtcagaagttggggacaatcaaaacctcttctcttctttcttttgtcaacaaagaaacatttccattgagtctctctcaatgttcttcttcttcttcttctaagattaattcaaagtgtttaatacttttgaaattttaagtttctttttggtcagtttcaaatgggtgacatcatcggtcacaaggataggcaaatatggccaccctctcatcatgttcttcaagatccattgtttgatcattccaacaaacatcaggtttatattatcttatatctaaattttttctatttgaatttgttatttttttctcctattctatatcgaagtcgttgttaattaaattctcacatagttgcagaaatatgtcaagaaccaccatcaccacggcaacggtgaatttcgtcggcccggggcacctcctcttagacaaacatttcctttggtatttcttttcaatcttttttttggttacaatctcttaacggtattggaggaaatatcattatggacattaacgtatgtatttaaacatatcttatatattttcaaactaaagctcaaatattttgtatatatatttttgtgtgttgaagaactataatacaagacaaaagcaccaaagcaattggcaaaggagtaaaggagaggatcgtatgcaagcatttttcttggttacaccgggccgtacaacttctggcaccggagtttttcttccagccacggcttctcatccacccaccaaaaaaacaggttatttattaattactctatactaagtatttatgaacacaaataaaggtgcataatgttttcaatttcataaaatcaattctaccaactgcatatactaaaattcttttagtttcaggttaaagttgatttgacatgatttttaacttacattttgtcgttaagtcgtttttttttttttgaaaataatgttcaaattatattcaaaagaaaaataacttttttacaaccactgcttcttgagattgaagatttagagctagacaaaatttagaagaatttgaaaatttttgatgattttttttgtcgttttttgttttaaacatatataaacacaaaaacctcaattcttcgattactacgaaatatatcatggattcatacatctattaccatttttttctatctatttcgtagcttttgtaggacaattgacataaagaaattgtgatttgttggtttttacgttagtcagcctttactatatagactcattaatatatgatttaatgttatacaattttgattgatgaaaacaaaattctcttgtcatagcttgctcaccggtgcttctcccgactcgtgtagttcaagcactcaatcttaacattcacaacaacggtatccatatttctcctcgtccaggttcttttccaaccattatttgttctcatcgaccgttattcaaatacattgtgttatatattacaaattagtttgaactatagatatattttggttgaaattggtaacattgtttcttttgaatgtagaaattagagaaaatgattcgaagaagaagagcgaaatgttggcaacaacacctatcaagattgaagcagaaaatcctattgattcgccggagaaacttctccccgaggaatggatttattgatgacccaaccattagtatggaaaagtagaatcaaataaaataaaatgaaagattcttgtgttgatgttacaaaagaaaagaaaagattcttgtgttgataagaaaagaaaagattcttgtgttgtatgcttcgtcaccattggattagtaataaaaatccaaataagagactctgtatattccattcataatgtaatatcccctattttcagttgaaaaatttgcataatttagttgtcacaattattaatggatttaggaaaaattggatcaacaataccaagatgaatgactggattcgaacaccaacgttactattgggctaaaaggccgaatcaagaatactaaaaccttttgtttttttactatttagctagctaatgatgaaattttttatcattgtattgttaattttgactaaacaaaagttttaaacagttttttttcaaaactaaacaaaatgtgattgataaaagataaatttctaaagtgagtgattagattccgcaaatcagattatttgagttaattattctgtttctttcatttggggttgtttttgttcaataaaaagttgagaagggtgttattgataagttcaaaacaaatagggtataaccaaacattcaaggaagtaagagaccgtcggtgtgaagcagaatccataattggggacttaaacataaattcccctattgctgcttttcctcctcccgctcttgcttcttgccattgctgtttcgagctctcctcaaagccctaattttctcctcttcttcttcattctctcaccatgaagctcgtcaggtatggtttctactcggattctctttatttcttcggtttaattggaatttgcttcgaaattttgagatttctctttgttttcatgctcttcgatgtttgatttcgtatctggattttttcgcaggtttttgatgaaattgaacaacgaaacagtttcaatcgagcttaagaacggaaccattgttcatggaaccattactggtacgcttctcttaaaaacccagctctattcgctgtttagggttttgtgtaaaatctacgatgcttacctgtaatcgatggttactcgcgtattcacaaattctgatggtgtagtttgagtttagctagtgtctttcccctaataatgctttgttggtattaaccctagtgacactggtcaagtcagatgcagatgagtacactagattttacttgaatcgaggtttatgagatagtttagttcttcttcaaactttgatcacccatgaggtagtttactttctcctttgatggttgtaaccaatggagctctcgaatttactaattctgatgtgtaattctgttaatagacctagaaatgcattgtgggtgttgaatctctcttgtttgcaataagtgaatgataatggtggtctagtcagatggagatgatacattttattttgctttatagttgggtgtatgagaatgcttagttcttctgggagtgagtttagcacatgattatatatgagatagtttactttagtttccctctttatcattgtggacctctcttgttaacaaatcctgaggcttaattctgttattagtgatagtatctgaagaagttagagtttagctgagtcttaattatttttttacctcgaaatgctttgttggtaaccctcttgttagcaagaactgagtgatacttgtcgagtcagatgcagatgattagatttagcacatgaaagtcactcttatctctttccttgtaaagaaaatctctgatttttcacagaacagttaccgtgtggcttcttgtttcaacttctcttttagtctgattgatctaatacaagtggtctctgctgttaatgtttggtttggtttcctttttctgccatcatcttgtttagaatgcaattatcaatcaactcactgactggtactatctacttgtgatgacttaatgcaggtgtagatgttagcatgaacactcatttaaaagctgtgaaactcactctgaaagggaagaatccagttacattagaccacttaagtgtcaggggaaacaacattcgctattatattcttccggacagtttgaatctggagactttgctggttgaagacactccaagaatcaaacccaaaaagccaactgcaggtaacaaaacatttcttttttctgaactatgcctttgtttttgtttttgtttttgcttagactcatctttctattgttctctttggtatcaggtaagattccagcaggtcggggacgtggtcgtggaagaggtcgtggacgtggccgtggtggtcgttaagcattttgcagtaatcaaaagtctggtcctttttggtttgtaacagcaggattgtaaaagatctatcttgtagtgagatttggtgtcactaagacaaattcttgttatctctttaagttttcatgaatttgagatttgaaacgttattgccaaacatacatcactcaatatgttttattattgacttgatcactttattacatagtctgataaaacgtggggagttcgagaaatcaaaatcttgaccttatttttcaagactttggcaaagagtcgaaagattaaactaagatagagcctttcatgacagtcacagctttcccggtaagcaagactctctgcttctccttatcataatgaaccttgagtgttccacttctttgcgaagcctgaaaagaaattcgttgattcgttaatatgtgtgattatttcttgcttcgaaatgttagttagctagttacagagaaagatgaattaccgcaaaagcgacgaaatcacacttgttcatcttgaggctccagtaatgtgctaatgaacaatgtgcacttccacatacagagtcctgaaggaacaaaagcaccaagcaaataaggtaacggtaaacacttttggtaacggctaccacaagtaaaaagcagagaattgctcccatgcacgaagttgcaggttagtttcttaacctcattgagccctagtttaggagcaaagagtcgactgcagaagtcaaaaggagatccttgaggagcagcagcggtaacaatcatcactttgccagggcatttcacgatatcatccactcttggctgaaattcaatgacagattcccaagatgaaagcacaacctgtaatcaaatcatataaataagcaaaaaatagaaagttcacaagttttctttctaaggaaatctgaaatacatacgatgatttggtctgttgaagttgttttgaaagctcctatcaagggtttaaagatgagtctatcagttttagtttctcgaacatcgacaatggtagctccattcaaggctttagagaagatggagacatccttggagctgtactcacaagttgtaatcacagggaaattcatttcgatcaagaaagatcttttagagtcacaatcagacagccttttagcggttagaatccccgagttggtggaaaattcgacagtgtcagatgaaccaaccaaactgtttgagaagatactatgagctgatgctagtgttgcatgaccacatatatccatctacaaaatcaaataaatcgaacattgtacaaaatggaacggagggagtaataaaatacaaaaatgtttgcaagatggacctcggctacagccgtgaaccacctcagaaggaaacgtggtggttcggagccggggatgggaataagaaaacacgtcaatggaaggtcaaactcagaggccatagactgaagccacacgtcgtctctctcatgatcctcttcaagaaaacacactgcagcttggttccccttgaaggctgactcagtgaatgcatcaacctgtgtttagcaatactcgttcataaagaagaagaagatcacattatcagagcaaaaacaaagaaaagaatatacaattaccacgaagtacttgacaggaaaattcatatccattgacgtttttggttctatttttgccattgatgttttcgttagaccaaagctaaacttttataccattttggaggcttttaatttacaatgccacttcatcttttaagagaaacagacaatctttgtagggcaaaatcttattgaaacaaatctcggcttttaatcttttttgttttgtttatatgctaacagttgaattgtactcaaatcattatgaaatctgcagctttgcaaaattttatattcagcaaaggacagatctaatcaagtggaagcaagcactcataaagcaaaaacgcacttattgacaaaacaaatatggtatgtttattccattattcttatgctaagcatgtgatgaattgtgttgcatagcttactagtcgttaaaaatcaaacaaaaattggttagtcaaaaaggaacactcaaacaataataactgattgatagtacatgggaagatttggtaggtattcttaaaatctccaaaaaaggacaggtaacactttgggaagcttacaaggataataacatttctaaaagaagtactcagagcaaagtagaaaggaaggaagttatactagtacattgcgagaaacaaaaaccaaagaagacgaagaagaatatacaattaccatgaagtacttcacaggtttcttcacgagcatggccatagctcctcttcttcctattgaaatctacttatctggaaacaatgtgctccacgttctatttaataatgatagagtctccagaccaaaaacaaacatttattgatagtaaaatctgggaagatttggtagggaactttggaaatccatcaacaataaatgtattgtctgtgagtgaaagagaactgttggagagtcattcaaaatgaacacacatggtcagaaaacatggacatatcctatcagtggctcctacgagcgaccacacctcatgtaaggtggatcagtcagctgacactattttgttttgaaaagagtaaattcattgttattcattataggagcttgttttgtagcagaattcaacacagtatataatttcagatcagaccaagacatggccttccatcacagtaacggctttgcctctcaggagaaccctctgcttctccttgtctagatgaatccttatcgttccactcctactcgaagcctaagcaacatttccaaaaactcaaaatcattcactaggaagcactaaacgctactttaaatttaaagagataagagagattacttggtaggctaagaaatcaaacttattcatcttgatgctccagtaatgtgccaatgcacaatgtgcacttccacaaacagggtcctgaaaaaggcgacacatttcaggcagaagaaatcatattctttggtgttttgttcaatcctaagagcaaagactataatgtaagttgcagctactcttttacctcatcaactccgaacttaggagcaaagtaccgactgtaaaaatcataggacgatcctgtagaaccagcagctgtcacaattatgccatcacaggggcatttcaatatatcatccattcttggttgcaattcagtgacagattccttagatggaagcacaacctacaagcaagtgcataaaagagtaaatcaaaagtcatacaaagattaggttaacctatgagcacacatgaatacactgcgtgaacaaagtatcaaacttacgaggatgttgtttgttgcagtagcttttatatcaacaatggtagctccgttcaaggccttggtgatcatagaagaggatacatcactgagattaacatcacaagttgtaaccacagggaaattcaattcgatcaaaaaggttcctcctttcacttcaccatcactgagctctgaagtatctgaaacacgcttggctgtaagaatccctgatcttgtgacaaactcaaccatgtctgaatcaaccaaaccatttgagaagagacaatgagcagatgccaaagttgcatgaccacagagatccacctacaaatcaatcaacaaacccaaatcaaaaagctagtgaattcgagatcagttcctatcagtcaaaatgaacaatctaaagtcgaagtctttaaaaagaattttcttcaaatgcaagaaattgcaagttactttgatcaatctaaaacagtagagagattgtgtagtcgagttcagtttctatcaatcaatgaacaatataaagtcgaagtctttaaagagaaacagaagtcaaaatagttggtgaaacctcggctaaaggggtaaaccagcgtagactgaagcgagcttggaaaccagtgatgggaataagaaaacaagtttcggagatgttgaattcggcggcgagagactgaagccacgtgtcatctctctcgttatcgtcgttgagaaaacaaacagcagctggattccctttgaaagccgaatcagtgaaagcatccacctttcaacacaccaaatattcagtgagtattctgaaatacaacttggagaattgaagagagaaataaatagattaccacaaagtacttgacacctttcttcttccccatatctcgatcgatctttttgagcaaagttatgtttttttctttctttccatcacacatcttttgacttcacatagcaaacaccaacaagccaacaacaacacggacaaataatattatttgaattttttatttgatggcccaccattttaattagtgattaatacataaaaacagattatttatttattttatttttttggtatcaatgttaagtatttataccattttcgaagttgtaacagaagttacacggaatacatgtagcggaaaaataaatctacagaagacacagacaaaaacaaacagcaatagtggttaacgttaaccaaaagcggaaataagagaagaaacaccgattccgagaagctaaactcggaaatttgcgtgatttccacaactcgaagataccaaagagttggagtcccatcctagttgccacgagcaaaccttagcagaagcccgtacacaaaacctctcgataaagcgcctacagcttctccgcaaactaacgcaaaaacgcaaagacaacagaggactaaaacacaaatccgacggttacaggagcatctacgggtaatgcatatatctttgtgactttaagagcatgttcatagatgtactcacaaagtatcattaaaaaattttttagtattatttataatatttgtttaataattatatatattatttttttattttggtaaatgtgaccaattagaaaaagccacgtcagatgatactggtatcacaaatatcattggactaatactaatcaacctcattctaattattttgttaaaataatttttggacttgtgatactctagaaatatcacccatgtacatggtctaatgaatctcatttttgtaaaaattttgttaaataaaaaacttttgtcaaaattttggctcagtcttctgtgtaattactcttaagattttgtcttgtaactcttaaaatgcatagggtttagggtttgagaacattttatcttttgataaaagagagaatgataaaagtggctgtaagaaacacataagagagataataaagtggttttaatgatttgatatcatacattgattgtgtcaaaaccatcaaaatctcaatttggctacacaaaaacctttcataagcaaaaatgccaataattgtttgagaaaagaagaaaaaagtacatatgcgtttctaattggaactcttagtctttggtctcccagagtccgggtcccgtgttcctagaaatgacgccaaattgaagcctagaagaagaaaaatcccataagagtccaatctcgtctttttgcttcaagtgtctcctgcggacaaaatcttcttgccagccatgcgctagaccatattgcctctgatattccagacgcagctcatgcaatgtgcccgtgtcgtagtcatatacgttaacattgactccgacattaatttttatcatttggtctttaggtaaatgtcttccaatgtgctcattaaaggagctactttgcagaataagtctgccacaacgaggcctaatatcgtacgagctcagtttcttctttatggtccattgtggtgttgcgttgccaaatcttggggtagggatcatcacaatcttttctttctctctttctacgttcatcaccgacccactctttccaaaagaaccaatatcaatcttgttttcgaaagggccacgagtgtttgtgccatatccttcacctaaaccgataaacaaacatataataaactcacaaggaagtcaaaatctgacaagggaagacttttacttaccctgcatttctaaaccctcatagataacataaggaagcttcgaatcttcagtagaatcagcgaacaatgtagctaaatctatgccatcttgttccatgtcaacaccaattagacttccggagttgtgtaacagcctttgcatcacgagcacattaggatctttttgtgcaccaaagttccttgtagaatcaagagaacctgcaacacccaagaagtaaaggtattaatatagttttttttattcctgcgcaatgtcttatacataatttgtgatgaaagaacgtaccttcgaacatgtcatcataaagattgaacgtgtctgtgtatataaggatattatcattgtcgtagttacttgggttttccctgtacgattcatatcccttcaagacttcttcatctgtttcttggctcggactattcttctccgcttccttggatcgcacgtaagaagaatttgatgattcttgagtcgatggagatatagggtcgtcggagagagtcatctctgtttcgttggatcacgatagttaaaacgacttagtactctttttcgatttcttcttcgtcggagagacttatcgttaaaacgatttgagattgagagagactgttagacggattagtgagaccgcgagtgacgagactcgtttctgtctttcttttctttttttttttttttaacatcttcattttattgatattatgaagaattgtaatcaaatcgtaatgctgtgtaaattacaggtggtatagtagagtaaaatttaaaatgttcttctcgaaacaagtgagctttggctagcagatctgcaggtttgtttgtcatccgagtgacccatgtgaatttacactctcgaaatcgatttctccatgcctgaacttctctaacccaattatacagatcaaatcgtgcctttccatcattgagaattttcagcagctccatgttatctccttcgaagcagactcttgtatatccatgactccagcagttctgcattgcaaatataagggcttgaaattcgttctcgattgcactgttgttggttcgtcctctagcttgtcctgcactaacaaaaaggcctgcttcatctcttgttacccaacccgctttacctgtctttcttttcttatataataataccggccttattttgttgttttgaataagaaaatgtatatgttttaaagaaaaaatcaaattacgaacacttcaaaacataatctagatcattaatttattacacgtgaaaagaaaacaaaaataataatttcatttaaatatttatcaaattaaaatatatttattatataataaaaatataaaaatatttattatataaatatatatttaatataaattatattattatataaaatatacttattatacaattaaaacataaacaaatttattatatatttctgatgaattcttctacactcatgatatatactctctccaccttttcttttgcagtgaaagctcacaaaaatatacaaaactacattctcatcaaaaaatcaccaacttaaaaaataccaaaaattgtatttaattctatagttaaaatcaatttgagttttattgagtttttatataattttagtcttttaggtgaatttggggaattgttatttgttgttaaatcctacttcaaatcatgaaatttgaatctttgtattttgaagtatgtaaattatctaaatccaagtcttctttagtccaatcccaagcattctgcatcatcagctgtcttttctcctagggtgcgtgtgaagtcattcctgagattgaaggtctcctggatctgcctctcatcatagccgcaagagttcgacaagtacgtttctgcccctagattgtcaaacataaccaattagataacactagatagagatgaaacagaaggcaatgccaatgctctgtgtcgtatggcttctgcaacaaggtatatagagtagctggacagtggacgtagaaatactatgggccagaattattatgggctcaaattagaagtatttctattgggccagcattatttattctctaccctaaaccctactatttcaacacttgaccaaaatggcctttaagacacgctgggcctacgccaataattatccacgtcggtctaaaactcaatgacttgacgaaaatgcctttgaggattctatgaaattaccgaaattacccttttgtttcttagccgcgtaagtttcgtctgatattatttttcttcttctccgagaaacaaaccctttaatttactgttgtttctcacaattctcaaaaatctctcatccgaattgcgccttttccgcttccttttgctctgtcaaatctctcaaccggaaaaatctcgggaaggttcgtctgatccaattctgaagattttgaaaaacccaccgagaacttcgaggtgaatttgatcatcttcttcaaaaacctgtttttttgtttgtttgttcttgtgtgtctctattgttaattttgacgaggagatttatatatcctatgatcaggtcgtgtttcacttctctaattaagttgctttcttttgattccaccgtattgtatctctggatcgaaattagggttttagtgtgtgttgtgaactttaaacgcataaagtttctgcctttcgcgtatttgaaagtttgatgcagccatattctgtagtgtctccaagcaattttctagggttttacataaatatgatgtaacttcttatttgttgattttactaattagatgatacttttcagtgaagttattgtcttttgggattacttgaatcaacccaatagctcttgcaccattttaacccagtaataatcgtttgtttttgctttcttgcagatttaattgaatttttcactgatgggttacaaagcagtttaccgatctctcacggaattgtttccacaggtaagctcatatctttatctgttttcactaaacttgacttgtagctgacattttcacaaaactaagggtttcataaacttgagtaagacgctagttttctgttgagtaatggtagattttacgagatgcttgtgtcgatatgtttctgaggttttagtataaattttcctctatgaaatgcgatgattgattatgtaatctcacattccagtgtagtctcacactccagttgctgtttagcctgttttggaaccaacttatattgttattaaatctatacaataaaattttctacagattgatgcaaggcttttaaaagctgttgctattgagcacccaaaggatgttaatgaagctgcagctgtagttgtttcagagattgttcctttcttttaccctaatttggctgatagttctactcaacctgagaacaagacacccggaaatgtgcctaccgaaggtacttattctttgcaatgataatattatatttttctgttctgctactaggacattttttttgtacatttgaagtttgagggtatgttctgatgaaatgccagttgaaaatgcagtagaacgtgatatgccattcagtgtgttgtctggttcagagatgggtggttcatattcaggatctgcctctatggcttttgaatatcatgaaacaagggccccagttactgaatcggtttctaagaggaatcagttgacacatgttatgccaaatgttgttgttgatattcagagaaaaggtaagatcgggttgagcggatcggatgagtctggagtggtttcctcagaaccccctgtctcctgtcaggcaggagccaaatcgactggcgatgattggcaaggtgttgagtttcacagtacaggtaatcaagcagaagctagcacaagcgcagattcagaagatgctgtgcataagctggtttatcctgcagacaatttggcaattacacagaactcacatcctcttcaaattagatttgggagtatcgatgttgtgaacgagacatcaagtggttcgttggctgttgaaaatagtgatgccgagttgagtggttcaaatcttgtggatgagatatcaaagggctctttggccgatgaaaatggtgatccagagctggatggtgctgttagctctgttggtaacagatcaacccagggatgcaacatggtccaccttgaacagatcattgaagatgccaaaagtaacaaggtatgccagtgtatattttggacattctttcatttccaggaaataattaattttggggttatgtgttcgataggagggtttctttatcgatatctcagtatcattttcttctttatattttgtgatgatgtagagaaccttgttcactgtgatggagtcgattatgaatctgatgagagaagttgaacttcaagagaaggaggcagaaaaggcaaaggaagatgctagtataggaggctttgatactcttgacaaggtggaggagctgaagaagatgctggaacatgcgaaggaggcaaatgacatggtgactttttgttactaatattttactgatacgtgtgttaactgtgcttaggttttaattggggaactaatcatttgtatgttacaggctgctggagaagtttatggggagaggtcaattttgaccactgaagttaatgagcttgaaaatcgcttgatcagcttatcagaagaacgagacaactctctctctgttcttgatgaggtccgtgcaggccacacgattagatcctacttgatttactcagtatttctgttttgttcatttgcaactccattaatcgttaacaatacacgctactaatatctgttttttcacactgtaagattttgctgattgtgtttcttttgtttttacttttagatgcgtgtagatcttgaaataagactagcgacagctttggggataaaaaatgctgctgagcaagaaaaacaggaaaaagaagggtctgcacgcaaggcatttgctgaacaagaagcgatcatggagagagttgtccaagaatccaagcttctacagcaggaggcagaggaaaactccaaggtaacaacactaccttgagattgtcatgaatgaatggttctgaatctgatttcacaacttcttaacttatcttgatctctttcttcagctgcgagagttccttatggatcatggtcgaattgttgattccttacagtaagtcttcttccttgctactagcaattcaaatttatctcctcgtgaatcattaggataagaggctgtgaactatggagtaaatgatcggacccacgaaccaatttagcaattttcttcgcagttgtatgataatcaggaatctgttgatatatttgttgtttaaatgttcagaatcttatggtgaatcttgtctgctattgatcttaactattcttttacccttttggtacttccttgaacagaggagaaatctctgtgatctgtcaagacatccgacacttgaaagagaaattcgacaaccgagtgccattgagccaatcaatctcctcaagccagactagctgtaaactggcttcttccgcctcatccatgaagagcttattgacggagaagcctttggaagcatcttatgaaacacctgaagcctcgagcaataacaagagcccaaaagcttctgttaatgaacgtaaggagcttctggatgacggctgggacttctttgacaaagagacagagctctaagtgtcttcttttcagtagattatcggtgctagaataaaagagatatgaagggattctgggttctgctctatgtagagtaaagcttggatctttgatctaatctaccgttagtataaaacatctattgagctctcttttatttttcttctcagtgtatagtttgcttattgtttttttggtgtttttttccacctctttgtggtactgacataaacaaagactatcgttttgtcatagaattttgagattttgaagaaaagttggataatttagtatactttttaactgactttataaaacgaattagcttcaattagagcttcacaattctcggattttactgaatgacaagttaacaatttaagctagaaaaaaatatgctctaagcctggacatgttgttagtcatggccagcgtatgtgtacattaggtaaatgaaaacaaaaacaaaaactttgaaggtttctgttaagaaaggaactaatttagcaataagagacatgatattacaagctcaacactgtcgctatatctaccagaagccaacaaatcttccagtgcgtaccattggagccacttttcaggctcattagacaaaagtagcacatataatgtaaagacgaaacgatgataaagagactcacaaggacataattccaatacagaagaagtttgatgtcattactcattagaaagaaaggtataacacaggaacggaaacatagttgaacaattattcatcaggggctttacaaggccccaaaacacaaaccaccaaagttttaaatgaaacgagacatgaacttcttctgattcataacagagataagtttttagaaaccaccacggagccttagcaccaagtgaagggtagactccttctggatgttgtagtcggccaaagtacgaccatcctcaagctgttttccagcgaagatgagacgctgctggtccggagggataccttccttgtcctggatcttagccttcacgttgtcaatggtgtcggagctctcaacttcaagagtaatggtctttccagtgagagtcttcacgaaaatctgcatacctccacggagacgcaacaccaagtgaagtgtagactccttctgaatgttgtagtcagccaaagttctaccatcttcaagttgttttccggcgaagatcaatctctgctggtccggtgggataccctctttgtcctggatcttggctttgacattgtcgatagtgtcagagctctccacctccaaagtgatagtctttccagtcaacgtcttgacaaagatctgcataccaccacggagcctgagaacaagatgaagtgtggactccttctggatgttgtagtcagcaagagttctgccatcctccaactgctttccagcgaagatcaacctctgctggtccggaggaataccctccttgtcttggatcttggccttgacgttgtcgatggtgtcagaactctccacctcaagagtaatcgtctttcccgttaaggtcttgacgaaaatctgcataccaccacggagcctgagaaccaagtggagggtggattccttctggatattgtaatcagccaacgtacggccatcctctagctgttttccggcgaaaataagcctctgctgatccggaggaatgccttccttatcctggatcttggccttaacgttgtcgatggtgtcagagctttccacctcgagggtgatagtctttccggtgagagtcttaacaaagatctgcatctgtaattcacaaaaaactgagattaatcgcttggataatctcaaatccgattaaaaaagctaccaccagatctgaatataaatcacatatcggatcaaattcaaagaatcgacgcctaaatatacaaatctgtgaaatctacgaaccctagttcagaatatagatgagatctagcgatgaaactcagatatttatctccgatcaaagattaaccgaatcaaactcaaagaacagggacgaaattgcgatcgaatggaaaataatcgaagaaactgaataagaacccagaaatttaccttgatcccgattgagagatttgaaagaacgatttcagagtttgagaaatttggaatctgaatttgtgaagaagaataggtcttaggttattaatttatagaagaagaaaaaaagacgaggacgagtcggtcacgagaaagctaaggcggtgaagcaataaccaaccaaagcttgacacgtaacttttacacgaaacgattttttggctaattgccttatttgataaacacgatccgtgtgcccgcggctgcaaccaattttaacgccgtttatttctaaccacaatctctatcgtcccggttattagagccagatgttgagacttaacgatcgtaccaataaaaccgggttcaataatatatgtaacccggtttgatccgataggatcatattgaaccgttacccatggcacttaataaggttttaattaaagatcagcagattataaatttgagattttgaaatataatgctttcgttgttttggccagaatagaagcattaatacaattgtttaattcactttaaatgtgaacatgatttgaggatatctctgttttattgtttttggaacaaattgttgagtataaaaaaaaatgagaatttttttaaatcattaatgcaaaatccatgatttatttaaaaaatcttaacaataaataaatctatatatacatttttgtaggaggtttttgaagataatattgaaaatttgagccataattcaacaattaattcaaatgggtgggttttacccggtttaactctgttcggatcctggataacatgtttaattctgttctgatcttggataacattaatttttggaaaagttacctaaaaactaataattaaaaacgaaaattaaggatttaattaccaaatttaatataaacaatatctctaaactaaccatatttcttatttaccttaactaatttcctaaaatatttttacctaatttaaacataaatatataattcttctttcatttttatttgatcttatactttatttattttgactttatataaaatatatatagttaataaaatattataatttcttctgaatatgatgtaattcaaattttttaaaatggacatatattattcaacctataaagaaataatatgtgtacaatgtcccacatcgcttaaaaaaattgcacaatggttcagacccatattataaaaggaccaaaatgattctaattacgaatgagcaggaagcttgatttatcaggcgtccaaaattaaaatagttatccgattttactcggattttttattttaaagaattgaaactttaaaatgtttcaagaaattataaatattataacttttatcaaaagttaaatattataatttaaattttttttataaagtttatctttaaaaaatgctttaaatatttataattttaaaacttataacgttttaaaaattataaattaaattttacaagaaatttaaatattataaatatataaaaaatatattaatacgagacgatatattataggaaaaatcttaaatataacagtcaaaattcaatgatgaattttgggtcgatattgtattttttgaagtttcaaattttataatattgaaatttataagaaaatgacaaaattatgtttaatttcacgggactaggttatatggtaggacgggtttgggtggataataattacgattttacaatgtccaacatcgcttaaaaaaattggacaatggtcaagagccatactataaaaaggaccaaaatgatttcgattacgaatgagcatgaaacttgatttatgaggtgtccaaaatttaaatggtttgtttactagggttatttattttaaaaaattgaaactttaaaaagtttaaaaaattataaattaaattttacaagaaatttaaacaatataaaagatattaatacgggacgatatactgcgagagaaatcttagatataacactcaaaattaaatgatgaagtttgggtcaatattaatctttttttgaagtttctaattttataaatatttgaaatttataataaaatgacaaatttgtgtttaatttcacgggacggggttatatggtgtgacgggtttgagtggataataacatgggatagtatgctatagaaaaaacatataataacaatcataatataattatataatcttaaacactaaaaaaaattaacaatattataaaaaaaaaacttaaaactttaatttttttaaaacacattttgattcttttataagaaatttaaacattataaatatttaaactttatactacgggtgaaattttagaattgactgtttgggttgataagaatttgcgatagaactaggagttaaatcctagaatgacaatcaaaatatagttatacaattaaatattaccacgagtgaaatcctagaattgacgagtttgaatcgatattaatatgggatggtgtactgcgggtgatattttagaattgattggtttgggttgataataatttgcgatagaattaggagtgaaatcctaaaatgacaattaaaatataattatacaattaaatactaccacgggtgaaatcctagaattgacgggcttgattcgatattaatatgggatggtgtactacgagtgatattttagaattgactggtttgggttgataataatttgcgatagaattaggagtgaaatcctagaatgacaattaaaatacaattatacaattaaatactatcacgggtgaaatcttagaattgacgggtttgattcgatattaatatgggatggtgtactacgggtgaaatctgataaacaacaatcaaaatacaattatacaatattaaacatttaacaaaataaacaaatacaactttaaactttaaaatttgagttataaaatttcgtcacgcggtgaattatacatttaaatcaaacaatagcataaatttattaaatcatcctaaaaaatattcaattattttttatttaataaaaatattggcccgcggtatactgtgggttaatatctagtaaatatatatttctaatgcattttttctttaaatccatgagaattgttttttgaaaatctataaagtatttttcaaaataaatcttaacacaaattgatagtatataattctaaagttttaaaaggcatcacaaaccaataacacctcctaaattgcaattcaaatccaacataaataaagtcctgaaactgatatcatcaatataatatttccagtaattattttctatacctacacttttttaatagttgtatttgctatataattattttattttcgatttcgaagattcgaataattacgagtcggcgggtggacaatccgtcaacggtttactccgttctatttttgagaacaaatcaaatttttaatgtaaaagtggtcaattattggttcgtagtaattttcttttattttttttggtcagtactactacggactttaatttataaatggtaaatcaaaagcggttaaatttaatagatgtattcatttcaaccaagttaaaaagcctcaaatttatttactaattaaatcaatctaaattgtatatacatatattcttttcaatgttacaatgttaccaacttagatattagtgtatatgtactaactttttaattcaggattcatttgcattttcgcaacattcactcacacgagtaaggcacgtgagatatgttctccaaaattttaattacagaaaatcaaaaacaaaattcgaacgagaagcagaaaaaatcggagaatcggaggaagaagatgaaatgtcgttggagaagaagaacaacgtcaatggcgccattttctctcgtcttctcctcttttcccggaatttcagtttctcacagtcaatcgccaattcgattttctcgggaaactgtcagagaaaaaacaaaaaaacaaatcgcctcctccaatctctggtaactcagacactgaaaaaacctgagatttcatcttcttttgaataaaattttgtactttttggtgatctctttaacaggatttgttgaacatttttggttgaaattgcgttgttaaagagaagaagatggcttcagtacaagatattggtctatcagcagctataaatctattatctgcatttgctttcttgtttgcatttgctatgcttagacttcagccagttaacgatagagtttacttcccaaaatggtatctcaaagggataagaggaagtccaacgcgttctagaggaatcatgactagatttgttaatttagattggactacttatgtcaagtttcttaattggatgcctgctgctcttcaaatgcctgaacctgagcttatagaacatgcaggccttgactctgctgtatatatccgcatttaccttcttgggtatgtatcttcttctgatcttgaattcattctcatgaggcacaagcttgtttcttaggttgttctgttggtttttcagattgaaaatgttcgttccgataacactacttgcttttggagttttggttcctgtcaattggactggagaaactctagaaaatatcgatgacttgacattcagtaacgtcgataagctgtcaatatcaaatgttccaccaggatcgccgaggtattattcactactgctttctctcagttcagggtatatgttagcaccttgctaagtttggtggactgttgttatctgcaagttacagactctgtcaataaaaagggtttcttttttacaaagtgtgtgatggtattgtgcagctttctattttatcaactaagacggctggaagtttcttggttccaggttttgggcacatataactatgacatacgtgattacattctggacttgctacatattatatatggaatataaggctgtggctaatatgagattgagacatctagcagcagaaagtcgtcgtcctgatcaactcactgtgagttattctatctgttgtgtttatctttaccgatatgtagaaacttacttctcttttccttgaacaaagatcttgcaaacataatatatttgggagtgatgcctctatgtatgtatgctttaaggaaaatggttattagtgatcataacagcattttacataccccatacaagatagatatatcacttttttagtagtttctgaaatttgaatcggtgacctgattcttgctactcatgtttgttctttgaagtattgccatcttcgcttttgcaggtacttgtaagaaatgttcctccagatcctgatgaatcagtaaacgagcatgttgagcacttcttttgtgtaaatcatccagatcattatctttgccatcaggtacgtttctttagctggctgaaagtaaattcatcaacaatatctcgaaaaccactaatagagtggtattcagaattatttagtttcttcacttgagtatgtcatgcgttttcttatttgatgttcccaggtagtgtacaatgcaaatgaccttgcaaaattagtcgcacagagaaaagctatgcaaaattggttgacgtactacgagaataaattcgagaggaagccatcaagtagaccaacaacaaaggtacttctgttgcaagactattttaacctttgaccatatagctctcgtgtaatgtttcagcaaaatgactctttgaatttcatgcttatcatgaattcaattctcgtcggtagttatttaatttattatatagacaggttatggaggtttttggggaactacagttgatgcaattgacttctacacttcaaagatggatattctggctgagcaagtatgtactcacctgtagaagtaatcttcataccattttcatcttaattataagtgcattcgtaattctttacatacacaggaagctgtagaaagagaaaagatcatgaacgatcctaaggctatcatgccggcagcatttgtttccttcagatcacggtggggaacagctgtttgtgctcaaacacagcaatgccacaatcccacaatctggttgacggaatgggctcccgaaccacgcgatgttttctgggataatctcgctattccatatgttgagctctcaataagaagattgctcacaacagttgcactgttttttcttattttctgcttcatgattcctatagcatttgttcagtctcttgccaaccttgaagggatccaaaaagttctccctttcttgaaacccgtgatagaaatgttagtccccgttttatgataaacagaaatttgttcttgactgttgccttggaacttttcgctcatgccattcatcttttgttcatatgcaggaagactgtaaagtctgtaatccaagggtttcttccaggaatagcgttaaagatttttctcatcatacttccaactattctgatgacaatgtcacaaattgaaggatatacatcgctgtcctatttagatagaagatcagctgaaaagtatttctggttcattattgtcaatgtctttcttggaagcatcattaccgggacagcgtttcagcagcttaaatctttccttgagcaaccaccaaccgagtaagtacttggtgagaatttccgaccgataacacatgagaacatctattgacctcctcttctttctctttttacttaggatcccgaaaacagttggtgtgtcaatcccaatgaaggccacatttttcatcacatatatcatggtcgatggttgggctggcatagcagctgagatactcagagtggttccattagtcatctttcacctgaaaaacacgtttttggttaagacagaacaagacaggcagcaagcaatggatccaggtcatctggactttgcaacatctgaaccacggattcagttctatttcttgctaggcctcgtatacgctgctgttgcgccaattctccttccattcattatcgtcttctttgctttcgcatacgttgtttttcggcatcaggtaccttaaaagctaaaaatatcatagtgttcttctaaagcatacctgcaatatatgcaataatgttaatatgtcttatctactgctgcaaggttattaatgtctacgaccagaaatatgagagcggggctagatactggcctgacgtgcatagacgtttgatcatatgtctaataatatcacagcttctgatgatgggtctgctcagcacaaagaaatttgcaaaagtaacagctctgcttctccctcagcctatcttaaccttttggttttacagatactgcgcaggacggtttgaatcggccttctcaaaatttcctttacaggtgatgagtcaaaagctcttgctgcaaaaaaaagacttgtatacaaatgtttcaactgattttttgggattgaatatatttaacaggaagcaatggtgaaggatacactagaaaaagcaactgaaccgaatctaaacctcaaggaatatctgaaagatgcttacgtgcatccggtttttaaaggcaatgattttgaccgaccacgggtagtcgatgaggaggaaagtaaccctcttgtaaggaccaagaggacttctcaaggtacgacccgatacaactcagaagctagtagctctgctacaaccactcctgtagccaacaatgactctcctaggttaatgtagctcgcatctcttactactgttgtaacggtccaggcattttgtttcatgatgtttgttaagtgtcattgttgtagatgttggggtacaaaaattgggtcctttggatgtgtaattgttgtttcatacagttgttagttaaagctttgtcaaaacataccatatatgtatgtatatttattatttgttacaaaattctttttttttgaaattctgaaaaatctacatatacatttttgtaggggattttgagctttaattccttttaattcatttgggtcggatattacccggtttgattctattcggatctaggataggatttgatgggtcgggttattatccggtttaattgtgttcggatcctaaataacattaattcttgaaaaaaacattatctacaaaaaaaaaaattacaaaacgaaattaattatttaattaccaaatttaatatatatatatatttttaaactaaccatattttgtacttaccttaactaatcggaggagcattgacaaaactgccgaagacgatgaacattgatcgagaaaatgtaaattagtttttttttactggatttgggaaactgtaaagtcgtgggagagatgaaggtaaattggtgagagtcaactgcatttggtttaggaaaaatgggtttggtttgatttacagatcaaaaatcggttttaaggtataatagtaaatttgagaatgcaaagtgtctggtcctttttaagtgttgtaacacgttaaatgtttttaaaaaagtgtcttagagggcaatattctctaaatacgaaatacttgagtataaataataggaacaattacgctttaacatactttttaaacttcatttacattttcccacacttttaacttttgaagttttttacccttgtgttattacccctatacccccaactaaagaccatacccctctctctctttctagaattcatgtcatatgcagccattgggccattatcctcggcaaatttcgttaccaatgatgatttaccaaccctaacaaaataaaaaaaacaattcaattaagatgatatatatgaaaaacaacaatgcgtaagaaaagagaatagaaaaaaactatgatgtcaaagaaaaaatcatagaaagaatggataatttacccttcaggcgtttgaactaggctgagacgatgagtattaatcttgagaagaattttaaggactagagagatcttacgaaaaaataaactagaaagatcttacaaacaaactagaaagaaaaaaaaatctctacatctaagaagatgaaaaaatgtgagatgacatagggaaccgtgacactctcttttccttttattattagtgtggtgttagaaccctttttcttcttttattaaaaaaaaacactagagcaaccttcaaaacactctcttttccttttattattagtgtggtgttagaaccctttttcttcttttattattagtgtctcgtgtttttcatttcacacagatattagtaccctcccacatttatctttaatcgtcatacactgtgattaaatttctagatgaacagcacaataaatgagttgtggggttatgggcaaaaaaaataaacgttggctggtgaaataaacttattttataaaaccacttgtttcctatttattttgaacatgttttttttttttttgcctctctctctctctacatatataacttcgttaccttaaacatccatcttcgaccatcaatgtcaatttctatcttatgccccctaggattcctgtcatacgtagctcttgggtcattatcattcgcaaacttcgttaccaatgatgatttacaaaccctaacaaaatttagcaaacaattcaattaagatgatatatatgaaaaaattacaatgtctaagaaaagagaatagaaaaaacctacgatgtcaaagaaaaattaatagaaagaggggataaattacccttcatcgccgatgacgaaaaccaatatattcattgtactatattcaggcgtttgaactaggatgagaggatgaagatttatcttgataagatgtttaaggactagaaagatcttaagaaaaactataaactaggaagatcttacaaataaactagaaagaaataaaatctctagatttaaaaagatgaaaaatgtgaggtgacatggggaaccgtgatagagcaaccttcaagacactctattttccttttattattggtgtggtattgtaacactttttcttcttttataattggtgtctcgtgattttcatttcacacagttaataatactttcccacatttatctttaatgtcacacattgtgattaattctctagatgaacaacacaataaatgagctgtagagttatgggcaaaaaaataaataaattttggttggtgagataaacttattttgtaaaaatcacttgtttcctatttattttgaacgtgtgtttgtatatttttctctctctctcttcaacatccatcttcgaccatcaatgtcaatttctctcttatgctccctagaatttctgtcatacgcagcccttgggccattaccatctcgacaaacttcgttatcaatgataatttaccaaccttaacaaaatcaaacaaataattcaattaaggtgacatatattaaaaaactacaatgtctaaaaaaaggagaaaagaaaaaactacgatgtcaaagaaaaaataatagaaagaatggataaattacacttcatcaccgatgacaaaaaccagtaaattgattgtactagaaagatcttacgaaacactataaattaaaaagatcttacaaacaaactagagagaaaaaaaaatctctagatctaaaagcatctccaacagaccctcaaaccctcaaatttgaggggtttttaactctaactccaacaacccttcaaaccctcatggcactattcacaccctcaaaatatttctcttatttcattttagtctttgtactttatattccttacaaataattctattaaagtcaactatttcaaatatattcatataaatttaaataaatgaaaattatttaaatataaaaaacaaatacaacaataatagtacactgagcatttcaacacaaattaaaattaacattacaatgataaataaatacataaacacacaaaataaattaacacttgaaaaaattacattaaaacataactaataaaaaattaaattcgtaatgcaatattaatattcaggtaaatttgatcctgaacctccaagatcaccaaaatattgtccataaacatttgatggaatcggaggttgttgttgttcttgatttcttttttgtatgattcttgcttgttcagatcgtataaattcacatgtattactatcatcaatatcgcttaaacgtgttagcaatattttattttccttccctatttcttttagagctaatttttttgcttgattttgcatacgcaattgagccatctcataatccttgcttctagttgatgcactttctttcaaaaaatcaagagagacatctcataacaagaagcatgccgaaaagatgttgaacgtgcgtttggagtcttacaatcgaagtttgctatcatagcatgatcgtcatgttactggaacaaagaagtattgcatgatataatgacagcttgcattataatgcataacataataattgaggatgaacatgatatcaatgcactgattagagattcaagattgatgccaccgccaacagttgaaacggggttaaatgaacagacaagatttcaacaatttttatcttataatctacagataaaaaataaagagactaatttatcactttgaaatgcattgagtgatcatatatgggagcattttggaaatatttatatagagtaattttgtaattttataaatcattttatgtttttttttatgttttttttttaatttatatataatattatattattatatggagttttttttttaaatcttgtttggcataattgtttctataatatatgtgttatatttatttgtgaaagttttatcactataactgattattgttaaaaattgaggattataatgtaaatacttcaaaaaattaaaataaatttgtgggtataccattggagtaagtgaccctcaaatcttcattttgagggtgtgccccctttaaaatgagggccattgttggagatgttcaaagaagaagaaataaggtgagatggcatggggaaccatgactagagcaaccttcaagacactctattttctttttattattagtgtggtgctttttcttcttttataattggtgtctcgtatttttcatttcacacagttattagggacctcccacacttatctttaattgtcacaaactgtgattaattctttatatgaacaacacaataaatgagcggtgaagttatgaacgaaaaaaataaattttagttggtgaaataaatttattttataaaaatcacttgtttcctttttattttgaacgtgtgtttgtattttttctacttttctctcttattatttgagttacttaatataatataatttatctatttttatataataaattaatatttaatttttcttatattttaagatttatccgttgttttttttaagtaaataattatatataaaataaacgaaatatctaatattaagtaactaaaatggagaagaaaaagaaaaagagagagagagaaagcatgccaaagggagcgaaagagaaggatgaaattgagaggggcaaattcgtgttactaagtatattaccgtaaaacaaatgaaaatcgaaagaagtgtctctttttgcaaacaatgttggccaaagtttgttattaaggtgtactagttgggtcaaagagttgttatttgttcctttgggtcgacatagagtcgggtttagttttgttaattgaataattctaagcctcaaaaaaatcttaagaattaaactgtcttcttcttcggtcccagccaaaaatccagaagattcttaaatctcatttctgcggcgtaggtgaagtcttagcgataagctttgtttcttcttcttcttcttctttacccatggatttttaacgaacaagagaagagaagaaccaagttttcttcgaaaggattgaactttgtttctttctcttcagctacaacaaccaaaaaatgatcaagctttgcttcatgacttctcatggttattcaatccctggccttggtcttcctcaagacctctgcaacaccgaaatcatcaaggtaactaattcttcagagtcatcatttcattttcatattggatttttgataatttggttgcttctgttatctgggttcctgtaaaattggtgtctttcgtctacatctggttgaatttcatgacttgaatgcttcagtttatctgggttcgtgtaaagttggtgtctttcgtgtacatcttgttggatttgatgatttgaatgattcagtttatataggttcatgtaaagttagcatctttgatttgcgttttttgcgtctgcgttttgttggatttgatggctcttgttttgattctgttattgtcaatgaatgaatcagcagaatagccggtctcatctggtgaatcccggagcaagacaagagatcatacctgcaagctccttcaatctgaatacagaactcttggaaccatggaaaccggtttcttcatttagccaattcgtggagattgattcagccatgatgaaacctctgctcatggatgttcatggtaaggctcaattactgcttctggttttatcagttaataatgaacctttctgcaatcagttcgttaatttacatgaacttgctttatggttgatacagagacggcaccagaatctctgattttgagctttggaatcgctgataagtttgcaagacaagaaaaggtgatggagtttcttctgtctcagtcagaggagttcaaggaaaaaggattcgatatgtcgctgttaaatgaattgatggagtttgagtctatgaaatccagttctcagctacgaccgtatgatacttcctctgttctttacttgaatcaagaattagggaaaccggttttggatctcgttagggatatgatggagaatccagagttctctgtgcgatcgaatggtcatgttctgttctcttcaagtagcaatcctgagttgaatgatctactttctattgcttccgagttcaatttgtcaaggaattcaacaacaaaatggagacagctctcaccgcttatcccacactttcagaggtaaaatccatcgcccagatttatgctcgcttgtgttgcgttgatttctcggtgttaaaacctttcactgtttttctaagcaggtttgaaagtgacgtatttacaccggctaagctgaaagcagttacagtgctagcacctttgaagaggtaatataatctcatcgctacttgcttctataactacttacttttgtgttgttagtgttctcatattcgtattctttttttcattcgaacaagtcctgagaaaagcaggctcaagtcaccaaggaaacacaacacgaagcgaaaagctaaagagagggacctatacaaaagaaatcatctccacgcttacgagagccttctctctttaatgataggcaatgatcatcgacacaaacacacaacagtactctctttacagaaatcatgtggagagctctcagagcttctgactcagttctctatcactgctgctggaactggaatcgctgtgctcttttctgtcgtatgtagccttgcttcaaggcgtgtacccttttgcgcaaataagttcttcgacactgggcttggtttgagtttggtaatactgtcatgggctgtgaatagactcagggaggtgattgttcatgtcaataggaaagcgaacaagccatgttcaagtttgaaagatgacgaaatcataaacagtgtggagagaagtatgaaggaggtttactacagagctgcaacggtaatcgcggtgtttgcgcttaggtttgcatgttgaaaaatcggggtgagaggtaaaaatcttgatttactactccatggaaagcttctaaaaggtcgtttgtaaatgactaaaacttgtttagtagctgtaaatgtgaaagatgatattatgtggtagaacctaagattaagaggtgaagaattttgaagagaataaatgttttgcaagaatgcgtttgttccatcactacaagctccaacatttcttcatcctccaccatatcaattttgttcaagaagcacacaagtgatggaataccaacctgtggcgaattacaacctaaaaaaacagtcataatttcttcagtagcttttcgatcaagtcacacaacaatgatgttcttcggtttgaacatatggtaaagtaagggccatgaaactttaattgtgtgaagagaatgaaatcagagcctcgcgttgacgaccctgcttgtactggtaaatcagtagtttgcatatttcgtctactatgctcgtcctatttgcgttgtttgaccccttcttgtaatggaagttgtaacacaaacataaataataactagagggaacgacgacatttattttcttttcaacaatataactagttcctaaatctaaattgggagtgtggaacctaaaaaagtagtatcagtacaaaatctaatgttacatacaagcttgtctctcaccacaagagtgagcactacaatctagcatagcatcataagaggaagcatacttgagcaaaagatttgctaaacatgaaataaatatttcatttctggtcaacttaatttaataatcgaaaattcatgattttggtttaaagaaataaaaacaaatacttgacaaaccacgaaggtgagaaagaattggaagtggctttttgaaagtttcacaaagtaggaagcatcaaaaagaaatagacgtttcgtgccctctgccctaatctttctcattggaaacataaattaagtttctctctgtttatttgatctacccaaagaaatctcaaagcagcaaaaagacaaaaagaaaaatctcgaaattgatggattcctagagaacgaaggagaagaatgtgcttttgagtagtttaggtcatcacttttgatacaacaccagctccaactgttctacctccttcccttaaggcaaatctttgacctgtttccagaagacgagacgtgaaggaaaagaatcagaaatccaacttcaagtaccaaaagagagtttctgtaagattgttttacctgtttcgagtgggacaggcatgattaactcgaaaacagctgtgacattgtcaccaggcataaccatcttcacgttttcgggtaattccactttgccagtgatatctgcagtcctcaagtaaaactgaggcctgtagttagagaaaaatgcagtgtgacgtccaccttcatcctttgtgagcacgtaaatctctgcttcaaacttcttgtatgtcttgcatgaaccaggcttagcaatcacctaatacgtaaaagcagaggattaaactttagttcagttggttttcagtaaagttggttttcgtcgtaaggatgcctaagcttaccattccacgctgaatgtcttctctctttagcccacgcagaagaagtcctacattatcaccagcctagcataatagaagccaaggtttgatcagtatcttacatgcccagaacttgtctttgtaatcttttgatattggctttacctgtccattatccaaaatcttcttgaacatctcaaccccagttacagtcgatttcagtggaacacccccctgaaaatcaaatcttgcagttatgctaaagaaaatgcttaattgtaatagccccccagaaaacaccagtttggcagtacaaacacaatatttatgcactctcacctcacgtaaacccaatatctcaacttcttcacccactttaatgactccctgttcgatacgaccggttgcaacagttccacgtccctttaagaaaaagaaatgtatcagaactgtttttttttttttaaagagtgaatcagaaaacaacaaggatgtagactaagtgtacttgaattgagaaaacatcttcaattggcatcaagaaaggcttgtcaaggacgcgaacagggtcaggtatatattcatcaacagcatccatcagctttaatatagcttgccttccaatttcatcattggtgccctgtaatgcggacagagcagatcctcggatgatgggaatatcatccccaggaaacttgtagaagctgaggagctctgtatagagacaagagttgatgtgagcaagcgtatacatacttcatatgctgaaagaagaagttctgtgacattaaaaatctacaaaccacgtagttccatctcgacaagctccaagagctcagggtcatccaccacatcaactttgttcaagaagcacacaagtgagggaacaccaacctgtggaacattgcataattttcaaattgtggcaaagaacctagctccactgagtagcttcaagtgttcatggtttaataatccaaacctggcgtgcaagtagaatatgttcctttgtctgcggcatgggtccatctggtcctgaaaccacaagaattccgccatccatttgcgcagctccagtaatcatattctgaaagttagcaacagaagcagtgaggctcaactgtttaccaaagtattttcaaaggaaacccgtatactgatgcatgttactccactatacaattgacaaatactagattatgatgcttgcatagagaataacccttctagttatcatagttcaaaaccgtgatcattgataaatagattggagtcagagtttcaagaaaatgtgtaacatgtaatgtttgcagcgttaaaatgatatacaccaaggagcagcatactttaagttccaagaatccgactattgttaacacctatcttatatgaaagtaaaaaagtatatcggtttcttactttaacataatctgcgtgtccagggcaatccacatgagcatagtgacgctttgcagtttcatactccacatgagcctacagaaccaagtaacatcaagtaaacgaacaaaatctaattagaaaaatgagaaaatgatacataaagataacacagaccgtggcaatagtaattcctctcttcttctcttcaggagctttatcaatttcatcaaaggcaatagctttagctttgccctcctcagcaagaacctgcaacataagtaagatcacaatatcaacttaaaaaaaaaacagattctttgacaataagtttcatgtaaccaatatacacaaaagaagtacctttgtgattgcagcagttaaagtggtcttgccatgatcaacatgcccaatagttccaacatttacatgaggtttactgccacaagagcaattacataagcagagcaatcacaatcagaatcaccaaccagttttccaactttccgatctgaagagggaaaaagaagcaaaaaatggaaagaaaactaactttcgagtaaaagtggccatggatctccagaaggaggaggttccgaaggtagaggaagagagatcatctccaccgatagaatgagagatcgagtaagaggaagtaacggaagcaccacagcgagagtagatctgggaagagaatggaacaaggcgcttcgagctagggtttcgaagaacaacggacgccattttgacttgtacgagagaaaggcgaacacacaaatgagatttggggttttagtcgcctgagtaacaagggtttctcttgaaacctcgaccctgttttttcttaaacccgatccgacgacccggcttaagcccattttagtattcttactattattgggccttagttcaaaacaccaacttgttcaacaaattaaatttttgtttattcgattttacgtgggctcgaagtactttttattttatttttgtttgttaaaaagctatcaagtatatccaaagtttttaagagcaaataaaatgggatccaaattataaaaaaaaatcacttaaaaattaacagtatagatgatatgatccttttaaaattaacagtatagataatatgatcgttatagatgaatatttaattttgcataaatatacatatttttgtcaagaacataaatcatgcatatttgaatttgaaggttaaacaatatgacggtactattacaaactgctatattacatgtcatatgattcatataaccgtgcctaaagggttaaaaaaaagaaaggcttttgtctcgagcttccaaaatatgtaatgtttttagggctcccaaaaaataatttataatatatcacaatggtttttcacgattttttagcctttataaattgcatatctaaattacggcttggtattcaggtatgctggtcgggtttgggtaataatcggtcgaatacggatatgtcggatatgctattctaggacccaatagggtaaatagaaaatctcggttcggattcggttcggatccaatcggtttcagatcggtttatatccaaatacccgaaattttacccaatacccgaatttgtatccaaataatcgaaaattttacccaaatacccgaagtttctagttataagaatacatgactatatatccaaagtttgaaacgaatcatttaaaataatattcacattcctatattaaaaaaataaagcaaattctgaaaatgtttctattcatcaaaagtctagaactccctaatagagtgtacaaattgtctacaactatagatgaaagagctccaaatatgattaacttgcgtattcttgtagacatttatgtcgggagagaagttgtatatctttgtcaaaaccaatctcaaatgtcactgatatatataaatgtgtttacacaatttctttgtaattaattgatgtctctcttatgctttcgaaagcaacggttcccactgatccacgtcgttgcatgatagtggttcctataatcacatgcgttgccgtggactgtcttactttatttcttaatatatagagtctatatcaatcctattatttcttttttatattcagccaagagtaaacccaagatgccattaacgatgatgaagcctttttacatgaaagtgttgaagatcacgattctccaccactacatcatcaacaaagcatgagagcttttacgtctcaagaaaaaagtttaaaactggaaactaaattctgaaaccagaggtttgattggataaaaaaaaaagtgaattcactaaaagttcacatagtagtctaatattgaataaacaaattatgaacataacccgtgattttatatgggatgtgattaatgaaatcatatgaagcctcggtgcattagtcacaaatcattttcatagatacatcataaaaaatttcaaaagataaaaagataaaataggggtttggcaaaaaaaaaaaaaaaaaaaaaaaaaaaaaaaaaagaagataaaatagtgtcttataaaaccatattttaatttatttttaagctttattttacggaaaatgcattatgtgtcctaaacatctgaaatatattttagcatgcaatgttaatatacaacaacttcggtgacgtatatataattgagcaacttcaacgattttaatttacagtttcgtgactcaaccaaaatatttagagcactaaatattgatgtgacaaacaaaaagcaatcgggataaacattttaatttttttatgctttttgtacaaatgttatatatatactttttttacaaatgtatatatacatgaaaacgtaaccttcggaaccatgtgaaagaaaaatatgaccaataatttgtcaagaaaacaaagagactataaataataagttgagaatagacaattgatgtatatttgaaatatgtataacatacgtagtccagaatatgaagtttttgtttgttaatattgagtgttaactcattacattaaacaagtttaattaagatcattagacgtatcactaggctaaagatacatcatcttttattagaatctattattcaaactaatatgattataatgttatttatatgttttacgtatgcaacatagaatactactacacagttgctgattaatattccaaaacaataaaggaagcttttgttttccggaccacatgggaatgtgttaccaactatctctttactttgacatgtaagatatgtaagaatcttcttaaggttttgaggctcagaagacaagagcatattttccatttatcgtaccttttgacggcaaagctaaataagaatataactttttcaactttaattggtttatcatacatctctagtactgtctcattattttcaattaactttgttataacttaagtttcgagacaaaaagctgagttttggaggattatccaataatatcgttatactatgtatcggtatattatcaaatagttttgcacctaagatatacaaagagtttcatattgtatagataacaactttttttaatcaattcaagatatttccattgttgcactagtgtgtcaataaatatctatatttaaatgctgtaaaaggactttatatatagtttacacaatattaaattatacataatatagtataatacttatattataaagtcattgtttatattcctcattctcgagataaattattctttgccatttacgaaaagagagaaacgattcttcgatactatctttcttcttgtagagccggtggctcatattccatgaatacattataattataagctt
